(19) United States
(12) Patent Application Publication
(10) Pub. No.: US 2023/0052369 A1
(43) Pub. Date: Feb. 16, 2023

(54) ANTIBODY CONSTRUCTS BINDING 4-1BB AND TUMOR-ASSOCIATED ANTIGENS AND USES THEREOF

(71) Applicant: Zymeworks Inc., Vancouver (CA)

(72) Inventors: Daniel T. PATTON, Vancouver (CA); David M. MILLS, Seattle, WA (US); Thomas SPRETER VON KREUDENSTEIN, Vancouver (CA); Gesa VOLKERS, Vancouver (CA); Dunja UROSEV, Vancouver (CA); Lee FREIBURGER, Vancouver (CA); Zhuang DUAN, Vancouver (CA); Elizabeth HALVORSEN, Vancouver (CA); Harsh PRATAP, Vancouver (CA); Brandon CLAVETTE, Vancouver (CA); Anna VON ROSSUM, Vancouver (CA); Duncan BROWMAN, Vancouver (CA); Peter Wing Yiu CHAN, Vancouver (CA); Danny CHUI, Vancouver (CA); Robert William GENE, Vancouver (CA); Sylwia JANCOWSKI, Vancouver (CA); Sukhbir Singh KANG, Vancouver (CA); Patricia ZWIERZCHOWSKI, Vancouver (CA)

(21) Appl. No.: 17/226,834

(22) Filed: Apr. 9, 2021

Related U.S. Application Data
(63) Continuation of application No. PCT/CA2019/051448, filed on Oct. 10, 2019.
(60) Provisional application No. 62/744,059, filed on Oct. 10, 2018.

(51) Int. Cl. C07K 16/28; C07K 16/46; C07K 16/30; C07K 16/32

(52) U.S. Cl. CPC C07K 16/2878; C07K 2317/94; C07K 16/28; C07K 16/30; C07K 16/32; C07K 2317/31; C07K 2317/35; C07K 2317/526; C07K 2317/622; C07K 2317/71; C07K 2317/64; C07K 2317/55; C07K 2317/24; C07K 2317/92; C07K 2317/33; C07K 2317/75; C07K 2317/624; C07K 16/468

(57) ABSTRACT

Described herein are antibody constructs comprising a 41-1BB binding domain and an antigen-binding domain that binds to a tumor-associated antigen (TAA), wherein the 4-1BB-binding domain and the TAA antigen-binding domain are linked directly or indirectly to a scaffold. The scaffold may be an Fc construct with modifications that reduce its ability to mediate effector function.

### CROSS REFERENCE TO RELATED APPLICATIONS

[0001] This application is a bypass continuation of International Application No. PCT/CA2019/051448, filed on Oct. 10, 2019, which claim the benefit of U.S. Provisional Application No. 62/744,059 filed on Oct. 10, 2018, which are all hereby incorporated in its entirety by reference.

### SEQUENCE LISTING

[0002] The instant application contains a Sequence Listing which will be submitted via EFS-Web and is hereby incorporated by reference in its entirety. Said ASCII copy, created on Sep. 3, 2021, is named ZWI-054C1_Sequence Listing.txt, and is 940,968 bytes in size.

### BACKGROUND

[0003] 4-1BB is a member of the TNF receptor superfamily that is expressed on in several types of immune cells including, but not limited to, activated NK and NKT regulatory T cells, dendritic cells, B cells, and stimulated mast cells. Resting T cells do not express high levels of 4-1BB; it is upregulated after activation through the T cell receptor (TCR). Also known as CD137 or TNFRSF9, 4-1BB is expressed on non-immune cells as well, including populations of neural cells found in the brain (Bartkowiak and Curran (2015), Front. Oncol. 5:117). 4-1BB is a transmembrane receptor that is activated by binding to its ligand (4-1BBL or CD137L), which is expressed on cells such as macrophages and activated B cells. Once activated, 4-1BB functions to promote division and survival of cells, enhance the effector function of activated T cells, and generate immunological memory.

[0004] Given its pivotal role in modulating T cell function, 4-1BB and 4.-1BB agonists in particular have become an attractive target for the development of cancer immunotherapies. In fact, a number of clinical trials have examined the efficacy of different 4-1BB targeting therapies, including anti-4-1BB antibodies alone, or in combination with tumor-targeting antibodies, checkpoint inhibitors, or chemotherapy. The majority of these clinical trials have been carried out using the anti-4-1BB antibody urelumab. Developed by Bristol-Myers Squibb, urelumab is a human IgG4 antibody currently in a number of Phase 1 and Phase 2 clinical trials designed to examine efficacy in treatment of cancers, However, urelumab administration is limited to doses of 0.1 mg/kg, as higher doses resulted in severe liver toxicity (Segal et al, Clin Cancer Res, 2017 Apr. 15; 23(8):1929-1936),

[0005] Utomilumab, developed by Pfizer, is a human IgG2 antibody that is currently in various Phase 1, Phase 2 and Phase 3 clinical trials, also designed to assess efficacy in treatment of cancers. Although utomilumab does not appear to induce dose-limiting toxicities, early clinical data indicated that its effectiveness as a monotherapy did not appear to be significant (Makkouk, et al. (2016) European Journal of Cancer 54:112-119).

[0006] This background information is provided for the purpose of making known information believed by the applicant to be of possible relevance to the present disclosure. No admission is necessarily intended, nor should be construed, that any of the preceding information constitutes prior art against the claimed invention.

### SUMMARY OF THE INVENTION

[0007] Described herein are bi specific antibody constructs binding 4-1BB and tumor-associated antigens and uses thereof. One aspect of the present disclosure relates to an antibody construct comprising: a) a first 4-1BB-binding domain that binds to a 4-1BB extracellular domain (4-1BB ECD), and b) a tumor-associated antigen (TAA) antigen binding domain (TAA antigen-binding domain) that binds to a TAA, wherein the first 4-1BB-binding domain and the TAA antigen-binding domain are linked directly or indirectly to a scaffold.

[0008] Another aspect of the present disclosure relates to an antibody construct or antigen-binding fragment thereof, that specifically binds to 4-1BB, comprising: a heavy chain variable sequence comprising three CDRs and light chain variable sequence comprising three CDRs and the heavy chain variable sequence and the light chain variable sequence is from any one of variants v28726, v28727, v28728, v28730, v20022, v28700, v28704, v28705, v28706, v28711, v28712, v28713, v20036, v28696, v28697, v28698, v28701, y28702, v28703, v28707, v20023, v28683, v28684, v28685, v28686, v28687, v28688, v28689, v28690, v28691, v28692, v28694, or v28695.

[0009] Another aspect of the present disclosure relates to pharmaceutical composition comprising the antibody constructs described herein.

[0010] Another aspect of the present disclosure relates to one or more nucleic acids encoding the antibody constructs described herein.

[0011] Another aspect of the present disclosure relates to one or more vectors comprising the one or more nucleic acids encoding the antibody constructs described herein.

[0012] Another aspect of the present disclosure relates to an isolated cell comprising the one or more nucleic acids encoding the antibody constructs described herein, or the one or more vectors comprising the one or more nucleic acids.

[0013] Another aspect of the present disclosure relates to a method of preparing the antibody constructs described herein, comprising culturing the isolated cells described herein under conditions suitable for expressing the antibody construct, and purifying the antibody construct.

[0014] Another aspect of the present disclosure relates to method of treating a subject having a cancer, comprising administering to the subject an effective amount of the antibody constructs described herein.

[0015] Another aspect of the present disclosure relates to use of an effective amount of the antibody construct described herein for the treatment of cancer in a subject in need thereof.

[0016] Another aspect of the present disclosure relates to use of the antibody constructs described herein in the preparation of a medicament for the treatment of cancer.

### BRIEF DESCRIPTION OF THE FIGURES

[0017] These and other features of the claimed invention will become more apparent in the following detailed description in which reference is made to the appended drawings.

[0018] FIG. 1 A-FIG. 1E depict exemplary antibody formats. FIG. 1 A provides a representation of a naturally-occurring antibody format (FSA format); FIG. 1B provides a representation of a one-armed antibody format (OAA) where the antigen-binding domain is in the Fab format; FIG. 1C provides a representation of a one-armed antibody format (OAA) where the antigen-binding domain is in the scFv format; FIG. 1D provides a representation of a bivalent antibody format where one antigen-binding domain is in the scFv format and the other is in a Fab format (also referred to as a hybrid format); and FIG. 1E provides a representation of a bivalent antibody format where both antigen-binding domains are in the scFv format (also referred to as a dual scFv format). In FIG. 1, the Fc portion of the exemplary antibodies are identified in white, while the antigen-binding domains are identified in grey.

[0019] FIG. 2A-FIG. 2G depict a number of additional exemplary formats contemplated for the 4-1BB×TAA antibody constructs described herein. FIG. 2A provides an example of a 1×1 format, where the antibody construct comprises one 4-1BB binding domain (depicted here as 4-1BB ligand), and one TAA antigen-binding domain (depicted here in the Fab format). FIG. 2B provides an example of a 2×1 format, where the antibody construct comprises two 4-1BB antigen-binding domains (both depicted here in the Fab format), and one TAA antigen-binding domain (depicted here in the scFv format). FIG. 2C provides an example of a 2×2 format, where the antibody construct comprises two 4-1BB antigen-binding domains (both depicted here in the Fab format), and two TAA antigen-binding domains (both depicted here in the scFv format). FIG. 2D provides another example of a 1×1 format, where the antibody construct comprises one 4-1BB binding domain (depicted here in the Fab format), and one TAA antigen-binding domain (depicted here in the scFv format). FIG. 2E provides another example of a 2×1 format, where the antibody construct comprises two 4-LBB antigen-binding domains (both depicted here in the Fab format), and one TAA antigen-binding domain (depicted here in the scFv format), linked to one of the 4-1BB antigen-binding domains. FIG. 2F provides another example of a 1×1 format, where the antibody construct comprises one 4-1BB binding domain (depicted here in the Fab format), and one TAA antigen-binding domain (depicted here in the scFv format); this type of antibody construct is also referred to as a hybrid format. FIG. 2F provides another example of a 1×1 format, where the antibody construct comprises one 4-1BB binding domain (depicted here in the Fab format), and one TAA antigen-binding domain (depicted here in the scFv format), linked to the 4-1BB antigen-binding domain. The representations in FIG. 2 are exemplary only, and it is to be understood that although the 4-1BB antigen-binding domains are depicted in the Fab format here, they may also be in the scFv or sdAb format, or if there are two 4-1BB antigen-binding domains, they may be in different formats or may bind to different epitopes of 4-1BB. Likewise, although the TAA antigen-binding domains are depicted here in the scFv format, they may also be in the Fab or sdAb format, or if there are two TAA antigen-binding domains, they may be in different formats, or may bind to different TAAs.

[0020] FIG. 3 depicts the formats of exemplary 4-1BB×HER2 antibody constructs that were constructed as described in Example 1.

[0021] FIG. 4A-FIG. 41 show the ability of 4-1BB×HER2 antibody constructs in different formats and controls to activate 4-1BB in a co-culture experiment using 4-1BB-NFkB-Luciferase Jurkat reporter cells and SKOV3 or MBA-MB-468 tumour cells. Shown is the amount of luminescence induced by each antibody construct: v16675 (FIG. 4A); v16679 (FIG. 4B); v15534 (FIG. 4C); v16601 (FIG. 4D); v16605 (FIG. 4E); v19353 (FIG. 4F); v1040 (FIG. 4G); v16992 (FIG. 4H), and v12952 (FIG. 4I).

[0022] FIG. 5 shows the ability of 4-1BB×HER2 antibody constructs in different formats and controls to activate 4-1BB in a primary CD+ T cell co-culture experiment with and without SKBR3 tumour cells. Production of IL-2 by the T cells was measured by ELISA.

[0023] FIG. 6 compares the ability of 4-1BB×HER2 antibody construct v16679, the 4-1BB antibody v12592, the 4-1BB×HER2 anticalin construct v19353, and the negative control antibody v13725 to stimulate IFNγ production in an assay in which CD4⁺, CD8⁺ or pan-T cells were co-cultured with HER2⁺ SKBR3 cells.

[0024] FIG. 7 depicts the ability of chimeric 4-1BB antibodies to stimulate 4-1BB activity in a 4-1BB-NF-κB reporter gene assay when crosslinked with an anti-Fc antibody. The four columns for each variant correspond (in order right-to-left) to the concentrations of antibody construct tested: 2.5 μg/ml, 0.833 μg/ml, 0.277 μg/ml, 0.092 μg/ml.

[0025] FIG. 8A-FIG. 8B show the constructs used for domain-mapping of antibody binding to 4-1BB. FIG. 8A shows the human, dog and dog-human chimeric 4-1BB constructs; FIG. 8B shows the full-length transmembrane human 4-1BB and the truncated human domain 3 and 4 construct.

[0026] FIG. 9A-FIG. 9I show the ability of chimeric 4-1BB antibodies and controls to bind to human and dog 4-1BB. The results are shown for v12592 in FIG. 9A; for v12593 in FIG. 9B; for v20022 in FIG. 9C; for v20023 in FIG. 9D; for v20025 in FIG. 9E; for v20029 in FIG. 9F; for v20032 in FIG. 9G; for v20036 in FIG. 9H, and for v20037 in FIG. 9I.

[0027] FIG. 10 depicts the ability of chimeric antibodies to bind to various 4-1BB proteins expressed in 293E6 cells.

[0028] FIG. 11A shows the ability of chimeric antibodies to bind to cynomolgus 4-1BB. FIG. 11B depicts the ability of these chimeric antibodies to bind to mouse 4-1BF.

[0029] FIG. 12A-FIG. 12F show the sequences of the mouse heavy chain variable domain CDRs of A) 1C8, B) 1G1 and C) 5G8 ported onto a human framework, as well as mouse light chain variable domain CDRs of D) 1C8, E) 1G1 and F) 5G8 ported onto a human framework. The sequences are numbered according to Kabat and the CDRs were assigned with the AbM definition and are identified by “*”.

[0030] FIG. 13 depicts the SPR sensorgrarns of representative humanized 4-1BB antibodies derived from mouse 1C8 antibody.

[0031] FIG. 14 depicts the SPR sensorgrams of representative humanized 4-1BB antibodies derived from mouse 1G1 antibody.

[0032] FIG. 15 depicts the SPR sensorgrams of representative humanized 4-1BB antibodies derived from mouse 5G8 antibody.

[0033] FIG. 16A depicts the ability of humanized 4-1BB antibodies derived from 1C8 to bind cells expressing 4-1BB as measured by flow cytometry. FIG. 16B depicts the ability of humanized 4-1BB antibodies derived from 1G1 to bind cells expressing 4-1BB as measured by flow cytometry. FIG. 16C depicts the ability of humanized 4-1BB antibodies derived from 5G8 to bind cells expressing 4-1BB as measured by flow cytometry.

[0034] FIG. 17 depicts the DSC thermograms of humanized antibodies derived from 1C8.

[0035] FIG. 18 depicts the DSC thermograms of humanized antibodies derived from 1G1.

[0036] FIG. 19 depicts the DSC thermograms of humanized antibodies derived from 5G8.

[0037] FIG. 20 depicts the LC-MS profile of a representative purified humanized antibody derived from 1C8.

[0038] FIG. 21A shows the ability of humanized 4-1BB antibodies derived from 1C8 to stimulate 4-1BB activity in the 4-1BB-NF-κB-luc reporter assay. FIG. 21B shows the ability of humanized 4-1BB antibodies derived from 1G1 to stimulate 4-1BB activity in the 4-1BB-NF-κB-luc reporter assay. FIG. 21C shows the ability of humanized 4-1BB antibodies derived fr©m 5G8 to stimulate 4-1BB activity in the 4-1BB-NF-κB-luc reporter assay.

[0039] FIG. 22 depicts the formats of exemplary 4-1BB×TAA antibody constructs prepared as described in Example 17.

[0040] FIG. 23A depicts the ability of 4-1BB×MSLN antibody constructs v2.2329 and v22639 to stimulate 4-1BB activity in a co-culture experiments using 4-1BB-NF-κB-Luciferase Jurkat reporter cells and MSLN^{high} H226 tumour cells or MSLN^{low} A549 cells. FIG. 23B depicts the ability of 4-1BB×MSLN antibody constructs v22353 and v22630 to stimulate 4-1BB activity in the same assay.

[0041] FIG. 24 shows the ability of the 4-1BB×FRα antibody construct v22638 to stimulate 4-1BB activity in the 4-1BB-NF-κB-Luciferase Jurkat reporter cell co-culture assay.

[0042] FIG. 25A shows the ability of the 4-1BB×NaPi2b construct v22345 to enhance IFNγ production by CD8 cells when co-cultured with tumor cells expressing NaPi2b at different levels. FIG. 25B shows the ability of the 4-1BB×MSLN construct v22630 to enhance IFNγ production by CD8 cells when in co-culture with various tumor cells expressing MSLN at varying levels. FIG. 25C shows the ability of the 4-1BB×FRα construct v22638 to enhance IFNγ production by CD8 T cells when in co-culture with various tumor cells expressing FRα at varying levels. FIG. 25D shows that the control 4-1BB monospecific antibody v12592 is unable to enhance IFNγ production by CD8 T cells when in co-culture with various tumor cells expressing varying levels of TAA.

[0043] FIG. 26 shows the formats of exemplary 4-1BB×FRα antibody constructs prepared as described in Example 20. The scFv orientation depicted in this Figure is for illustration only; the scFvs in the constructs may be in VH-VL or VL-VH orientation as described in Table 11.

[0044] FIG. 27A-FIG. 27F depict the ability of 4-1BB×FRα antibody constructs to bind to 4-1BB-expressing Jurkat cells as measured by flow cytometry. FIG. 27A shows the data for antibody constructs having a 4-1BB paratope derived from mouse antibody 1C8; FIG. 27B from mouse antibody 2E8; FIG. 27C from mouse antibody 4E6; FIG. 27D from mouse antibody 5G8; FIG. 27E from mouse antibody 6B3, and FIG. 27F from antibody MOR7480.1.

[0045] FIG. 28A-FIG. 28C depict the ability of the 4-1BB×FRα antibody constructs to bind to FRα expressed on 293E cells as measured by flow cytometry. FIG. 28A depicts the ability of v23656, v23657, v23658, v23659, and v23660 to bind to cells; FIG. 28B depicts the ability of v23661, v23662, v23663, v23664, and v23665 to bind to cells, and FIG. 28C depicts the ability of v23651, v17721, and IgG1 to bind to cells.

[0046] FIG. 29A depicts the ability of 4-1BB×FRα antibody constructs having FRα paratope 8K22 to stimulate IFNγ production in a CD8+ T cell co-culture assay with FRα^{high} IGROV1 cells or FRα^{low} A549 cells. FIG. 29B depicts the ability of 4-1BB×FRα antibody constructs having FRα paratope 1H06 to stimulate IFNγ production in a CD8+ T cell co-culture assay. FIG. 29C depicts the ability of monospecific 4-1BB antibodies v20022, v20036 or v12592 and the monospecific FRα antibody v17721 to stimulate IFNγ production in the CD8+ T cell co-culture assay.

[0047] FIG. 30A and FIG. 30B depict UPLC-SEC and Caliper profiles, respectively, of purified parental chimeric 8K22 variant 23820, while FIG. 30C and FIG. 30D depict UPLC-SEC and Caliper profiles, respectively, of purified representative humanized 8K22 variant 23807.

[0048] FIG. 31A depicts the BLI sensorgrams for the parental chimeric 8K22 antibody v23820 and two representative humanized 8K22 antibodies v23801 and v23807 in the supernatant. FIG. 31B depicts the BLI sensorgrams for the parental chimeric 8K22 antibody v23820 and the two representative humanized 8K22 antibodies v23801 and v23807 after purification.

[0049] FIG. 32A depicts the DSC thermograms of purified representative humanized 8K22 antibodies exhibiting a single transition. FIG. 32B depicts the DSC thermograms of purified representative humanized 8K22 antibodies exhibiting a two-state transition.

[0050] FIG. 33A depicts the LC/MS profile of purified representative humanized 8K22 antibody v23801. FIG. 33B depicts the LC/MS profile of purified representative humanized 8K22 antibody v23807.

[0051] FIG. 34 depicts the DSC thermograms of antibodies having 8K22 binding arms.

[0052] FIG. 35A depicts the BLI sensorgram for v29675; FIG. 35B depicts the BLI sensorgram for v29677; FIG. 35C depicts the BLI sensorgram for v29680.

[0053] FIG. 36 depicts representations of the additional4-1BB×FRα bispecific antibodies prepared and tested as described in Example 33.

[0054] FIG. 37 depicts the ability of various 4-1BB×FRα bispecific antibodies to stimulate IFNγ production in a primary T cell:tumour cell co-culture assay with IGROV1 cells.

[0055] FIG. 38A depicts the ability of 4-1BB×FRα bispecific antibodies to activate 4-1BB in an NFκB reporter gene assay with IGROV1 cells. FIG. 38B depicts the ability of 4-1BB×FRα bispecific antibodies to activate 4-1BB in an NFκB reporter gene assay with A431 cells. FIG. 38C depicts the ability of 4-1BB×FRα bispecific antibodies to activate 4-1BB in an NFκB reporter gene assay with HCC827 cells. FIG. 38D depicts the ability of 4-1BB×FRα bispecific antibodies to activate 4-1BB in an NFκB reporter gene assay with OVKATE cells. FIG. 38E depicts the ability of 4-1BB×FRα bispecific antibodies to activate 4-1BB in an NFκB reporter gene assay with OVCAR3 cells. FIG. 38F depicts the ability of 4-1BB×FRα bispecific antibodies to activate 4-1BB in an NFκB reporter gene assay with H661 cells. FIG. 38G depicts the ability of 4-1BB×FRα bispecific antibodies to activate 4-1BB in an NFκB reporter gene assay with H441 cells. FIG. 38H depicts the ability of 4-1BB×FRα bispecific antibodies to activate 4-1BB in an INFκB reporter gene assay with H1975 cells.

[0056] FIG. 39A demonstrates the ability of the mouse anti 4-1BB paratope 1C8 to bind to cyno 4-1BB; FIG. 39D demonstrates the ability of the humanized anti-4-1BB paratope 1C8 to bind to cyno 4-1BB FIG. 39B demonstrates the ability of the mouse anti 4-1BB paratope 1G1 to bind to cyno 4-1BB; FIG. 39E demonstrates the ability of the humanized anti-4-1BB paratope 1G1 to bind to cyno 4-1BB. FIG. 39C demonstrates the ability of the mouse anti 4-1BB paratope 5G8 to bind to cyno 4-1BB; FIG. 39F demonstrates the ability of the humanized anti-4-1BB paratope 5G8 to bind to cyno 4-1BB.

[0057] FIG. 40A shows the sequence of the rabbit heavy chain variable domain CDRs of 8K22 ported onto a human framework; FIG. 40B shows the sequence of the rabbit light chain variable domain CDRs of 8K22 ported onto a human framework. The sequences are numbered according to Kabat and the CDRs were assigned with the AbM definition and are identified by “*”.

### DETAILED DESCRIPTION

[0058] The present disclosure relates to 4-1BB×TAA antibody constructs that specifically hind to a 4-1BB extracellular domain (ECD) and to a tumor-associated antigen (TAA). In some embodiments, the TAA may be a folate receptor-α (FRα), Solute Carrier Family 34 Member 2 (SLC34A2 or NaPi2b), FEER2, mesothelin (MSLN), or Solute Carrier Family 39 Member 6 (SLC39A6 or LIV-1). In some embodiments, the 4-1BB×TAA antibody constructs may be capable of conditionally enhancing the activity of T cells within a tumor. In some embodiments, the 4-1BB×TAA antibody constructs are capable of promoting conditional agonism of 4-1BB. In some embodiments, the 4-1BB×TAA antibody constructs may be more effective in activating 4-1BB on T cells in the presence of TAA-expressing cells compared to a monospecific, monovalent anti-4-1BB antibody, as measured by cytokine production. In some embodiments, the 4-1BB×TAA antibody constructs may be more effective in activating 4-1BB on T cells in the presence of tumor cells expressing the TAA at medium to high levels compared to in the presence of tumor cells expressing the TAA at low levels. Thus, in related embodiments, the 4-1BB×TAA antibody constructs may be used to treat cancer.

[0059] The present disclosure further provides antibody sequences that specifically bind 4-1BB (anti-4-1BB antibody sequences). These anti-4-1BB antibody sequences may be used in the preparation of monospecific, bispecific, or multispecific antibody constructs that bind to 4-1BB (4-1BB antibody constructs). These monospecific, bispecific, or multispecific 4-1BB antibody constructs may also be used in the treatment of cancer, either alone or in combination with other anti-cancer therapies.

### Definitions

[0060] Unless defined otherwise, all technical and scientific terms used herein have the same meaning as is commonly understood by one of skill in the art to which the claimed subject matter belongs. In the event that there are a plurality of definitions for terms herein, those in this section prevail. Where reference is made to a URL or other such identifier or address, it is understood that such identifiers can change and particular information on the internet can come and go, but equivalent information can be found by searching the internet. Reference thereto evidences the availability and public dissemination of such information.

[0061] It is to be understood that the foregoing general description and the following detailed description are exemplary and explanatory only and are not restrictive of any subject matter claimed. In this application, the use of the singular includes the plural unless specifically stated otherwise.

[0062] In the present description, any concentration range, percentage range, ratio range, or integer range is to be understood to include the value of any integer within the recited range and, when appropriate, fractions thereof (such as one tenth and one hundredth of an integer), unless otherwise indicated. As used herein, “about” means±1%, 2%, 3%, 4%, 5%, 6%, 7%, 8%, 9% or 10% of the indicated range, value, sequence, or structure, unless otherwise indicated. It should be understood that the terms “a” and “an” as used herein refer to “one or more” of the enumerated components unless otherwise indicated or dictated by its context. The use of the alternative (e.g., “or”) should be understood to mean either one, both, or any combination thereof of the alternatives.

[0063] As used herein, the terms “include,” “have,” “contain,” “comprise,” and grammatical variations thereof are used synonymously. These terms are inclusive or open-ended and do not exclude additional, unrecited elements and/or method steps. The term “consisting essentially of” when used herein in connection with a composition, use or method, denotes that additional elements and/or method steps may be present, but that these additions do not materially affect the manner in which the recited composition, method or use functions. The term “consisting of” when used herein in connection with a composition, use or method, excludes the presence of additional elements and/or method steps. A composition, use or method described herein as comprising certain elements and/or steps may also, in certain embodiments consist essentially of those elements and/or steps, and in other embodiments consist of those elements and/or steps, whether or not these embodiments are specifically referred to.

[0064] It is also to be understood that the positive recitation of a feature in one embodiment serves as a basis for excluding the feature in a particular embodiment. For example, where a list of options is presented for a given embodiment or claim, it is to be understood that one or more option may be deleted from the list and the shortened list may form an alternative embodiment, whether or not such an alternative embodiment is specifically referred to.

[0065] The section headings used herein are for organizational purposes only and are not to be construed as limiting the subject matter described. All documents, or portions of documents, cited in the application including, but not limited to, patents, patent applications, articles, books, manuals, and treatises are hereby expressly incorporated by reference in their entirety for any purpose

[0066] It is to be understood that the methods and compositions described herein are not limited to the particular methodology, protocols, cell lines, constructs, and reagents described herein and as such may vary. It is also to be understood that the terminology used herein is for the purpose of describing particular embodiments only and is not intended to limit the scope of the methods and compositions described herein.

[0067] All publications and patents mentioned herein are incorporated herein by reference in their entirety for the purpose of describing and disclosing, for example, the constructs and methodologies that are described in the publications, which might be used in connection with the methods, compositions and compounds described herein. The publications discussed herein are provided solely for their disclosure prior to the filing date of the present application. Nothing herein is to be construed as an admission that the inventors described herein are not entitled to antedate such disclosure by virtue of prior invention or for any other reason.

[0068] In the present application, amino acid names and atom names (e.g. N, O, C, etc.) are used as defined by the Protein DataBank (PDB) (www.pdb.org), which is based on the IUPAC nomenclature (OUPAC Nomenclature and Symbolism for Amino Acids and Peptides (residue names, atom names etc.), Eur. J. Biochem., 138, 9-37 (1984) together with their corrections in Eur. J. Biochem., 152, 1 (1985). The term “amino acid residue” is primarily intended to indicate an amino acid residue contained in the group consisting of the 20 naturally occurring amino acids, i.e. alanine (Ala or A), cysteine (Cys or C), aspartic acid (Asp or D), glutamic acid (Glu or E), phenylalanine (Phe or F), glycine (Gly or G), histidine (His or H), isoleucine (Ile or I), lysine (Lys or K), leucine (Leu or L), methionine (Met or M), asparagine (Asn or N), proline (Pro or P), glutamine (Gln or Q), arginine (Arg or R), serine (Ser or S), threonine (Thr or T), valine (Val or V), tryptophan (Trp or W), and tyrosine (Tyr or Y) residues.

[0069] Terms understood by those in the art of antibody technology are each given the meaning acquired in the art, unless expressly defined differently herein. Antibodies are known to have variable regions, a hinge region, and constant domains. Immunoglobulin structure and function are reviewed, for example, in Harlow et al, Eds., Antibodies: A Laboratory Manual, Chapter 14 (Cold Spring Harbor Laboratory, Cold Spring Harbor, 1988).

[0070] As used herein, the terms “antibody” and “immunoglobulin” are used interchangeably. An “antibody” refers to a polypeptide substantially encoded by an immunoglobulin gene or immunoglobulin genes, or one or more fragments thereof, which specifically bind an analyte (antigen). The recognized immunoglobulin genes include the kappa, lambda, alpha, gamma, delta, epsilon and mu constant region genes, as well as the myriad immunoglobulin variable region genes. Light chains are classified as either kappa or lambda. Heavy chains are classified as gamma, mu, alpha, delta, or epsilon, which in turn define the immunoglobulin isotypes, IgG, IgA, IgD, and IgE, respectively. Further, the antibody can belong to one of a number of subtypes, for instance, the human IgG can belong to the IgG1, IgG2, 1gG3, or IgG4 subtypes.

[0071] An exemplary immunoglobulin (antibody) structural unit is composed of two pairs of polypeptide chains, each pair having one immunoglobulin “light” (about 25 kD) and one immunoglobulin “heavy” chain (about 50-70 kD). This type of immunoglobulin or antibody structural unit is considered to be “naturally occurring,” or in a “naturally occurring format.” The term “light chain” includes a full-length light chain and fragments thereof having sufficient variable domain sequence to confer binding specificity. A full-length light chain includes a variable domain, VL, and a constant domain, CL. The variable domain of the light chain is at the amino-terminus of the polypeptide. Light chains include kappa chains and lambda chains. The term “heavy chain” includes a full-length heavy chain and fragments thereof having sufficient variable region sequence to confer binding specificity. A full-length heavy chain includes a variable domain, VH, a hinge region, and constant domains, CH1, CH2, and CH3, optionally a CH4 domain. The VH domain is at the amino-terminus of the polypeptide, and the CH domains are at the carboxyl-terminus, with the CH3 (or CH4 where present) domain being closest to the carboxy-terminus of the polypeptide. Heavy chains can be of any isotype, including IgG (including IgG2, IgG3 and IgG4 subclasses), IgA (including IgA1 and IgA2 subclasses), IgM, IgD and IgE. The term “variable region” or “variable domain” refers to a portion of the light and/or heavy chains of an antibody generally responsible for antigen recognition, typically including approximately the amino-terminal 120 to 130 amino acids in the heavy chain (VH) and about 100 to 110 amino terminal amino acids in the light chain (VL).

[0072] The terms “antigen,” “immunogen,” “antibody target,” “target analyte,” and like terms are used herein to refer to a molecule, compound, or complex that is recognized by an antibody, i.e. can be specifically bound by the antibody. The term can refer to a molecule that can be specifically recognized by an antibody, e.g., a polypeptide, polynucleotide, carbohydrate, lipid, chemical moiety, or combinations thereof (e.g., phosphotylated or glycosylated polypeptides, etc.). One of skill will understand that the term does not indicate that the molecule is immunogenic in every context, but simply indicates that it can be targeted by an antibody.

[0073] An “antigen-binding domain” is that portion of an antibody that is capable of specifically binding to an epitope or antigen. The epitope- or antigen-binding function of an antibody can be performed by fragments of an antibody in a naturally occurring format. Examples of antigen-binding domains include (i) a Fab fragment, a monovalent fragment consisting of the VH, VL, CH1 and CL domains; (ii) a F(ab′)2 fragment, a bivalent fragment comprising two Fab fragments linked by a disulfide bridge at the hinge region; (iii) a Fd fragment consisting of the VH and CH1 domains; (iv) a Fv fragment consisting of the VH and VL domains of a single arm of an antibody, (v) a sdAb fragment (Ward et al., (1989) Nature 341:544-546), which comprises a single variable domain; and (vi) an isolated complementarity determining region (CDR). Exemplary formats of the antigen-binding domains described herein include but are not limited to the Fab, scFv, VHH, or sdAb formats. Furthermore, methods of converting between types of antigen-binding domains are known in the art (see, for example, methods for converting an scFv to a Fab format described in Zhou et al (2012) Mol Cancer Ther 11:1167-1476). Thus, if an antibody is available in a format that includes an antigen-binding domain that is an scFv, but it is desired that the antibody construct comprise an antigen-binding domain in a Fab format, one of skill in the art would be able to make such conversion, and vice-versa.

[0074] A “Fab fragment” (also referred to as fragment antigen-binding, Fab format) includes the constant domain (CL) sequences of the light chain and the constant domain 1 (CH1) of the heavy chain along with the variable domains VL and VH on the light and heavy chains, respectively. The variable domains comprise the CDRs, which are involved in antigen-binding. Fab′ fragments differ from Fab fragments by the addition of a few amino acid residues at the C-terminus of the heavy chain CH1 domain, including one or more cysteines from the antibody hinge region.

[0075] A “single-chain Fv” or “scFv” format includes the VH and VL domains of an antibody in a single polypeptide chain. The scFv polypeptide may optionally further comprise a polypeptide linker between the VH and VL domains which enables the scFv to form a desired structure for antigen binding. For a review of says see Pluckthun in The Pharmacology of Monoclonal Antibodies, vol. 113, Rosenburg and Moore eds., Springer-Verlag, New York, pp. 269-315 (1994).

[0076] A “single domain antibody” or “sdAb” format refers to a single immunoglobulin domain. The sdAb may be, for example, of camelid origin. Camelid antibodies lack light chains and their antigen-binding sites consist of a single domain, termed a “VHH.” An sdAb comprises three CDR/hypervariable loops that form the antigen-binding site: CDR1, CI)R2 and CDR3. SdAbs are fairly stable and can be expressed as a fusion with the Fc region of an antibody (see, for example, Harmsen M M, De Haard H J (2007) “Properties, production, and applications of camelid single-domain antibody fragments,” Appl. Microbiol Biotechnol. 77(1): 13-22).

[0077] Antibodies bind to an “epitope” on an antigen. The epitope is the localized site on the antigen that is recognized and bound by the antibody. Epitopes can include a few amino acids, e.g., 5 or 6, or more, e.g., 20 or more amino acids. In some cases, the epitope includes non-protein components, e.g., from a carbohydrate, nucleic acid, or lipid. In some cases, the epitope is a three-dimensional moiety. Thus, for example, where the target is a protein, the epitope can be comprised of consecutive amino acids, or amino acids from different parts of the protein that are brought into proximity by protein folding (e.g., a discontinuous epitope). The same is true for other types of target molecules that form three-dimensional structures.

[0078] An epitope may be determined by obtaining an X-ray crystal structure of an antibody:antigen complex and determining which residues on the antigen are within a specified distance of residues on the antibody of interest, wherein the specified distance is, 5 Å or less, e.g., 5 Å, 4 Å, 3 Å, 2 Å, 1 Å or less, or any distance in between. In some embodiments, the epitope is defined as a stretch of 8 or more contiguous amino acid residues along the antigen sequence in which at least 50%, 70% or 85% of the residues are within the specified distance of the antibody or binding protein in the X-ray crystal structure. Mapping of epitopes recoginzed by antibodies can also be performed as described in detail in “Epitope Mapping Protocols” (Methods in Molecular Biology) by Glenn E. Morris ISBN-089603-375-9 (1996), and in “Epitope Mapping: A Practical Approach” Practical Approach Series, 248 by Olwyn M. R. Westwood, Frank C. Hay, (2001). For exam pie, X-ray co-crystallography cryogenic electron microscopy, array-based oligo-peptide scanning, site-directed mutagenesis mapping, hydrogen-deuterium exchange, cross-linking coupled mass spectrometry, may be used to determine or map epitopes. These methods are well-known in the art.

[0079] The term “specifically binds” as used herein, refers to a binding agent's ability to discriminate between possible partners in the environment in which binding is to occur. A binding agent may be an antibody, antibody construct or antigen-binding domain, for example. A binding agent that interacts with one particular target when other potential targets are present is said to “bind specifically” to the target with which it interacts. In some embodiments, specific binding is assessed by detecting or determining degree of association between the binding agent and its partner; in some embodiments, specific binding is assessed by detecting or determining degree of dissociation of a binding agent-partner complex; in some embodiments, specific binding is assessed by detecting or determining ability of the binding agent to compete an alternative interaction between its partner and another entity. In some embodiments, specific binding is assessed by performing such detections or determinations across a range of concentrations. The term “specifically binds” as used herein in relation to antigen-binding domains, antibodies or antibody constructs means that the antigen-binding domains, antibodies or antibody constructs bind to their target antigen with no or insignificant binding to other antigens.

[0080] A “complementarity determining region” or “CDR” is an amino acid sequence that contributes to antigen-binding specificity and affinity. “Framework” regions (FR) can aid in maintaining the proper conformation of the CDRs to promote binding between the antigen-binding region and an antigen. Structurally, framework regions can be located in antibodies between CDRs. The variable regions typically exhibit the same general structure of relatively conserved framework regions (FR) joined by three hyper variable regions, also known as CDRs. The CDRs from the variable domains of the heavy chain and light chain typically are aligned by the framework regions, which can enable binding to a specific epitope. From N-terminal to C-terminal, both light and heavy chain variable domains typically comprise the domains FR1, CDR1, FR2, CDR2, FR3, CDR3, and FR4. The assignment of amino acids to each domain is typically in accordance with the definitions of Kabat Sequences of Proteins of Immunological Interest (National Institutes of Health, Bethesda, Md. (1987 and 1991)), unless stated otherwise. Typically, there are three heavy chain and three light chain CDRs (or CDR regions) in the variable portion of an immunoglobulin. The three heavy chain CDRs are referred to herein as HCDR1, HCDR2, and HCDR3, while the three light chain CDRs are referred to as LCDR1, LCDR2, and LCDR3. Thus, “CDRs” as used herein may refer to all three heavy chain CDRs, or all three light chain CDRs (or both all heavy and all light chain CDRs, if appropriate). CDRs provide the majority of contact residues for the binding of the antibody to the antigen or epitope. Often, the three heavy chain CDRs and the three light chain CDRs are required to bind antigen. However, in some instances, even a single variable domain can confer binding specificity to the antigen. Furthermore, as is known in the art, in some cases, antigen-binding may also occur through a combination of a minimum of one or more CDRs selected from the VH and/or VL domains, for example HCDR3.

[0081] A number of different definitions of the CDR sequences are in common use, including those described by Kabat et al, (1983, Sequences of Proteins of Immunological Interest, NIH Publication No. 369-847, Bethesda, Md.), by Chothia et al. (1987. J Mol Biol, 196:901-917), as well as the IMGT, AbM (University of Bath) and Contact (MacCallum R. M., and Martin A. C. R. and Thornton J. M, (1996), Journal of Molecular Biology, 262 (5), 732-745) definitions. By way of example, CDR definitions according to Kabat, Chothia, IMGT, AbM and Contact are provided in Table A below. Accordingly, as would be readily apparent to one skilled in the art, the exact numbering and placement of CDRs may differ based on the numbering system employed. However, it is to be understood that the disclosure herein of a VH includes the disclosure of the associated (inherent) heavy chain CDRs (HCDRs) as defined by any of the known numbering systems. Similarly, disclosure herein of a VH includes the disclosure of the associated (inherent) heavy chain CDRs (HCDRs) as defined by any of the known numbering systems.

TABLE A
Common CDR Definitions¹

| | Heavy Chain | | | Light Chain | | |
|---|---|---|---|---|---|---|
| Definition | CDR1² | CDR2 | CDR3 | CDR1 | CDR2 | CDR3 |
| Kabat | H31-H35B | H50-H65 | H95-H102 | L24-L34 | L50-L56 | L89-L97 |
| Chothia | H26-H32, | H52-H56 | H95-H102 | L24-L34 | L50-L56 | L89-L97 |
| | H33 or H34 | | | | | |
| IMGT | H26-H33, | H51-H57 | H93-H102 | L27-L32 | L50-L52 | L89-L97 |
| | H34, H35, | | | | | |
| | H35A or H35B | | | | | |
| AbM | H26-H35B | H50-H58 | H95-H102 | L24-L34 | L50-L56 | L89-L97 |
| Contact | H30-H35B | H47-H58 | H93-H101 | L30-L36 | L46-L55 | L89-L96 |

¹Either the Kabat or Chothia numbering system may be used for HCDR2, HCDR3 and the light chain CDRs for all definitions except Contact, which uses Chothia numbering
²Using Kabat numbering. The position in the Kabat numbering scheme that demarcates the end of the Chothia and IMGT CDR-H1 loop varies depending on the length of the loop because Kabat places insertions outside of those CDR definitions at positions 35A and 35B. However, the IMGT and Chothia CDR-H1 loop can be unambiguously defined using Chothia numbering. CDR-H1 definitions using Chothia numbering: Kabat H31-H35, Chothia H26-H32, AbM H26-H35, IMGT H26-H33, Contact H30-H35.

[0082] Throughout this specification, amino acid residues in VH and VL sequences are numbered according to the Kabat scheme, unless otherwise indicated.

[0083] “Chimeric antibody,” as used herein, refers to an antibody whose amino acid sequence includes VH and VL sequences that are found in a first species and constant domain sequences that are found in a second species, different from the first species. In many embodiments, a chimeric antibody has murine VH and VL sequences linked to human constant domain sequences.

[0084] “Humanized” forms of non-human (e.g., rodent) antibodies are antibodies that contain minimal sequence derived from non-human immunoglobulin. For the most part, humanized antibodies are human immunoglobulins (recipient antibody) in which residues from a hypervariable region of the recipient are replaced by residues from a hypervariable region of a non-human species (donor antibody) such as mouse, rat, rabbit or nonhuman primate having the desired specificity, affinity, or capacity. In some instances, framework region (FR) residues of the human immunoglobulin are replaced by corresponding non-human residues. Furthermore, humanized antibodies may comprise residues that are not found in the recipient antibody or in the donor antibody. These modifications are made to further refine antibody performance. In general, the humanized antibody will comprise substantially all of at least one, and typically two, variable domains, in which all or substantially all of the hypervariable regions correspond to those of a non-human immunoglobulin and all or substantially all of the FRs are those of a human immunoglobulin sequence. The humanized antibody optionally also will comprise at least a portion of an immunoglobulin constant region (Fe), typically that of a human immunoglobulin. For further details, see Jones et al., Nature 321:522-525 (1986); Riechmann et al., Nature 332:323-329 (1988); and Presta, Curr. Op. Struct. Biol. 2:593-596 (1992).

[0085] “CDR-grafted antibody,” or “CDR-ported antibody” as used herein, refers to an antibody whose amino acid sequence comprises heavy and light chain variable region sequences from one species but in which the sequences of one or more of the CDR sequences of VH and/or VL sequences are replaced with CDR sequences of another species, such as antibodies having mouse VH and VL sequences in which one or more of the mouse CDRs (e.g., HCDR3) has been replaced with human CDR sequences. Likewise, a “CDR-grafted antibody” may also refer to antibodies having human VH and VL regions in which one or more of the human CDRs (e.g., CDR3) has been replaced with mouse CDR sequences.

[0086] As used herein, a first antibody, or an antigen-binding portion thereof, “competes” for binding to a target with a second antibody, or an antigen-binding portion thereof, when binding of the second antibody with the target is detectably decreased in the presence of the first antibody compared to the binding of the second antibody in the absence of the first antibody. The alternative, where the binding of the first antibody to the target is also detectably decreased in the presence of the second antibody, can, but need not be the case. That is, a second antibody can inhibit the binding of a first antibody to the target without that first antibody inhibiting the binding of the second antibody to the target. However, where each antibody detectably inhibits the binding of the other antibody to its cognate epitope or ligand, whether to the same, greater, or lesser extent, the antibodies are said to “cross-compete” with each other for binding of their respective epitope(s). Both competing and cross-competing antibodies are encompassed by the present disclosure. The term “competitor” antibody can be applied to the first or second antibody as can be determined by one of skill in the art. In some cases, the presence of the competitor antibody (e.g., the first antibody) reduces binding of the second antibody to the target by at least 10%, e.g., at least any of 20%, 30%, 40%, 50%, 60%, 70%, 80%, or more, e.g., so that binding of the second antibody to target is undetectable in the presence of the first (competitor) antibody.

[0087] The term “dissociation constant (K_{D} or K_{d})” as used herein, is intended to refer to the equilibrium dissociation constant of a particular ligand-protein interaction. As used herein, ligand-protein interactions refer to, but are not limited to protein-protein interactions or antibody-antigen interactions. The K_{D} measures the propensity of two proteins complexed together (e.g. AB) to dissociate reversibly into constituent components (A+B), and is defined as the ratio of the rate of dissociation, also called the “off-rate (k_{off})”, to the association rate, or “on-rate (kₒₙ)”. Thus, K_{D} equals k_{off}/kₒₙ and is expressed as a molar concentration (M). It follows that the smaller the K_{D}, the stronger the affinity of binding, and thus a decrease in K_{D} indicates an increase in affinity. Therefore, a K_{D} of 1 mM indicates weak binding affinity compared to a K_{D} of 1 nM. Affinity is sometimes measured in terms of a K_{A} or Kₐ, which is the reciprocal of the K_{D} or K_{d}. K_{D} values for antigen-binding constructs can be determined using methods well established in the art. One method for determining the K_{D} of an antigen-binding construct is by using surface plasmon resonance (SPR), typically using a biosensor system such as a Biacore® system. Isothermal titration calorimetry (ITC) is another method that can be used to measure K_{D}. The Octet™ system may also be used to measure the affinity of antibodies for a target antigen.

[0088] As used herein, the term “conditional agonism” is intended to refer to the ability of the 4-1BB×TAA antibody constructs to agonize 4-1BB activity in immune cells such as for example, T cells or NK cells, predominantly when the immune cells are in the proximity of TAA expressing cells. In one embodiment, conditional agonism” refers to the ability of the 4-1BB×TAA antibody constructs to agonize 4-1BB activity in immune cells only when the immune cells are in the proximity of TAA expressing cells.

[0089] The term “amino acid modifications” as used herein includes, but is not limited to, amino acid insertions, deletions, substitutions, chemical modifications, physical modifications, and rearrangements. In some embodiments, the amino acid modification is an amino acid substitution.

[0090] The amino acid residues for the immunoglobulin heavy and light chains may be numbered according to several conventions including Kabat (as described in Kabat and Wu, 1991; Kabat et al, Sequences of proteins of immunological interest. 5th Edition-US Department of Health and Human Services, NIH publication no. 91-3242, p 647 (1991)), IMGT (as set forth in Lefranc, M.-P., et al. IMGT®, the international ImMunoGeneTics information system® Nucl. Acids Res, 37, D1006 D1012 (2009), and Lefranc, M.-P., IMGT, the International ImMunoGeneTics Information System, Cold Spring Harb Protoc. 2011 Jun. 1; 2011(6)), 1JPT (as described in Katja Faelber, Daniel Kirchhofer, Leonard Presta, Robert F Kelley, Yves A Muller. The 1.85 Å resolution crystal structures of tissue factor in complex with humanized fab d3h44 and of free humanized fab d344: revisiting the solvation of antigen combining sites1, Journal of Molecular Biology, Volume 313, Issue 1, Pages 83-97,) and EU (according to the EU index as in Kabat referring to the numbering of the EU antibody (Edelman et al., 1969, Proc Natl Acad Sci USA 63:78-85)). Kabat numbering is used herein for the VH, CH1, CL, and VL domains unless otherwise indicated. EU numbering is used herein for the CH3 and CH2 domains, and the hinge region unless otherwise indicated.

### Antibody Constructs

[0091] “Antibody construct,” as used herein, refers to a polypeptide or a set of polypeptides that specifically bind to an epitope or antigen and include one or more immunoglobulin structural features. In general, an antibody construct is a polypeptide or set of polypeptides whose amino acid sequence includes elements characteristic of an antigen-binding domain (e.g., an antibody light chain or variable region or one or more complementarity determining regions (“CDRs”) thereof, or an antibody heavy chain or variable region or one more CDRs thereof, optionally in presence of one or more framework regions). In some embodiments, an antibody construct is or comprises an antibody in a naturally occurring format. In some embodiments, the term “antibody construct” encompasses a protein having a binding domain which is homologous or largely homologous to an immunoglobulin-binding domain. In some embodiments, an antibody construct comprises a fragment of a naturally occurring antibody including at least one antigen-binding domain. In some embodiments, the antibody construct may further comprise a binding domain that is other than an antigen-binding domain, for example a ligand for a target protein.

[0092] In particular embodiments, an “antibody construct” encompasses polypeptides having an antigen-binding domain that shows at least 99% identity with an immunoglobulin binding domain. In some embodiments, an “antibody construct” is any polypeptide having a binding domain that shows at least 70%, 75%, 80%, 85%, 90%, 95% or 98% identity with an immunoglobulin binding domain, for example a reference immunoglobulin binding domain. An “antibody construct” may have an amino acid sequence identical to that of an antibody (or a fragment thereof, e.g., an antigen-binding fragment thereof) that is found in a natural source. An “antigen-binding fragment” of an antibody includes a fragment of an antibody having an antigen-binding domain with the required specificity. Thus, an antigen-binding fragment includes antibody fragments, derivatives, functional equivalents and homologues of antibodies, humanized antibodies, including any polypeptide comprising an immunoglobulin binding domain, whether natural or wholly or partially synthetic Chimeric molecules comprising an immunoglobulin binding domain, or equivalent, fused to another polypeptide are also included.

[0093] An antibody construct may be monospecific, bi specific, or multispecific, and may bind to at least one distinct target, antigen or epitope. Antibody constructs can be prepared in many formats, and exemplary antibody construct formats are described in FIGS. 1 and 2, and elsewhere throughout the application. The term “antibody construct” as used herein is meant to encompass monospecific, bispecific, or multispecific antibody constructs. A “monospecific” antibody construct is a species of antibody construct that binds to one target, antigen, or epitope. Monospecific antibody constructs may comprise one or more antigen-binding domains, each binding to the same epitope. Monospecific antibody constructs may be monovalent (i.e. having only one arm or paratope), bivalent (i.e. having two arms or paratopes, both binding to the same epitope) or multivalent (i.e. having multiple arms or paratopes, all binding to the same epitope). A “bispecific” antibody construct is a species of antibody construct that targets two different antigens or epitopes. In general, a bispecific antibody construct can have two antigen-binding domains, although, in some embodiments, a bispecific antibody construct may have more than two antigen-binding domains, provided that no more than two unique epitopes are recognized by the antigen-binding domains. The two or more antigen-binding domains of a bispecific antibody construct will bind to two different epitopes, which can reside on the same or different molecular targets. Where the two different epitopes reside on the same molecular target, the bispecific antibody construct is referred to herein as “biparatopic.” In some embodiments, the monospecific or bispecific antibody constructs are in a naturally occurring format, also referred to herein as a full-sized (FSA) format. In other words, in the latter embodiment, the monospecific or bispecific antibody construct has the same format as a naturally occurring IgG, IgA, IgD, or IgE antibody.

[0094] A multispecific antibody construct can include three or more antigen-binding domains, each capable of binding to a different target or epitope. In some embodiments, the multispecific antibody construct comprises a format that is the same as a naturally occurring IgG, IgA, IGM, IgD, or IgE antibody, but further includes one or more additional antigen-binding domains.

[0095] In some embodiments, an antibody construct may have structural elements characteristic of chimeric or humanized antibodies or may have amino acid sequences derived from chimeric or humanized antibodies. In some embodiments, an antibody construct may have structural elements characteristic of a human antibody.

[0096] Described herein are antibody constructs capable of binding to the extracellular domain (M) of 4-1BB and to a tumor-associated antigen (TAA). Also described herein are antibody constructs comprising sequences that specifically bind to the ECD of 4-1BB.

[0097] Antibody Constructs that Bind to 4-1BB and to a TAA (4-1BB×TAA Antibody Constructs)

[0098] Antibody constructs capable of binding to the ECD of 4-1BB and to a TAA comprise a 4-1BB binding domain that binds to a 4-1BB ECD and a TAA antigen-binding domain, wherein the 4-1BB binding domain and the TAA antigen-binding domain are linked directly or indirectly to a scaffold. Accordingly, in certain embodiments, the 4-1BB×TAA antibody constructs described herein are bispecific antibody constructs that bind to two distinct targets. In certain other embodiments, the 4-1BB×TAA antibody construct may be a multi specific antibody construct where the 4-1BB×TAA antibody construct binds to 4-1BB and to two or more distinct TAAs. In related embodiments, the scaffold is an Fc construct. In certain embodiments, the scaffold is an Fc construct with modifications that reduce its ability to mediate effector function.

[0099] In some embodiments, the 4-1BB×TAA antibody constructs are capable of binding to 4-1BB-expressing cells. In some embodiments, the 4-1BB×TAA antibody constructs are capable of binding to TAAs expressed on the surface of cancer cells. In some embodiments, the 4-1BB×TAA antibody constructs are capable of activating 4-1BB signalling in 4-1BB-expressing cells. In some embodiments, the 4-1BB×TAA antibody constructs are capable of enhancing CD3-stimulated T cell activation.

### 4-1BB-Binding Domains

[0100] 4-1BB (also known as TNFRSF9 or CD137) is a member of the TNF receptor superfamily. Human 4-1BB is a 255 amino acid protein (Accession Nos. NM_001561 and UniProt Q07011 for mRNA and polypeptide sequences respectively). The complete human 4-1BB amino acid sequence is provided in SEQ ID NO:79. The sequence shown in SEQ ID NO:1 includes a signal sequence (amino acid residues 1-23), an extracellular domain (ECD, amino acid residues 23-187), a transmembrane region (amino acids 188 to 213), and an intracellular domain (amino acids 214 to 255) (Bitra. et al. J. Biol. Chem. (2018) 293(26) 9958 9969).

[0101] The 4-1BB receptor is expressed on the cell surface in monomeric and dimeric forms and likely trimerizes with 4-1BB ligand to allow signalling. The structure of mammalian 4-1BB protein consists of four Cysteine-Rich Domains (CRDs) which show homology to other TNFR superfamily members. CRD1 consists of amino acids 24 to 45, and both the mouse and human 4-1BB lack a disulphide found in other TNFR superfamily members. CRD2 and CRD3 extend from amino acids 47 to 86 and 87 to 118, respectively, and are the domains that contact 4-1BBL (Bitra et al, supra). CRD4 is comprised of amino acids 119 to 159 and is followed by a short stalk region comprised on amino acids 160 to the transmembrane domain at amino acid 187 (with reference to SEQ ID NO:79). CRD1, CRD2, CRD3 and CDR4 are also referred to herein as domains 1, 2, 3, and 4, respectively.

[0102] In one embodiment, the 4-1BB×TAA antibody construct comprises one 4-1BB binding domain. In some embodiments, the 4-1BB×TAA antibody construct may comprise more than one 4-1BB-binding domain. In certain embodiments, the 4-1BB×TAA antibody construct comprises two 4-1BB-binding domains, and a TAA antigen-binding domain, wherein the 4-1BB-binding domain and the TAA antigen-binding domain are linked directly or indirectly to a scaffold. In related embodiments, the 4-1BB×TAA antibody construct comprises two 4-1BB-binding domains, and a TAA antigen-binding domain, wherein the 4-1BB-binding domain and the TAA antigen-binding domain are linked directly or indirectly to a scaffold, and wherein at least one of the 4-1BB-binding domains is a 4-1BB antigen-binding domain. In related embodiments, where the 4-1BB×TAA antibody construct comprises two or more 4-1BB antigen-binding domains, each 4-1BB antigen-binding domain may bind to the same epitope of the ECD of 4-1BB, or they may bind to different epitopes of the ECD of 4-1BB. In other embodiments, the 4-1BB×TAA antibody construct comprises a 4-1BB binding domain that is an antigen-binding domain, and a TAA antigen-binding domain.

[0103] In yet other embodiments, the 4-1BB×TAA antibody construct comprises three or more 4-1BB-binding domains that bind to the ECD of 4-1BB. In one embodiment, the three or more 4-1BB-binding domains include at least one 4-1BB antigen-binding domain. In one embodiment, the three or more 4-1BB-binding domains include at least two 4-1BB antigen-binding domains. In the latter embodiment, the two 4-1BB antigen-binding domains may bind to the same epitope of 4-1BB, or they may bind to different epitopes of 4-1BB.

[0104] The 4-1BB antigen-binding domains may be in say, Fab or sdAb formats. Thus, in one embodiment, the 4-1BB antigen-binding domain of the 4-1BB×TAA antibody construct is in a Fab format. In alternate embodiments, the 4-1BB antigen-binding domain is in a scFv format. In additional embodiments, the 4-1BB×TAA antibody construct comprises more than one 4-1BB antigen-binding domain, wherein at least one 4-1BB antigen-binding domain is in a Fab format. In other embodiments where the 4-1BB×TAA comprises more than one 4-1BB antigen-binding domain, at least two of the antigen-binding domains are in the Fab format.

[0105] The 4-1BB×TAA antibody construct comprises a 4-1BB-binding domain that binds to the ECD of 4-1BB. In certain embodiments, the 4-1BB×TAA antibody construct comprises a 4-1BB-binding domain that can bind to an ECD of human 4-1BB. Suitable 4-1BB-binding domains include naturally occurring molecules such as ligands or 4-1BB-binding fragments thereof. Examples of such molecules include 4-1BB ligand (see NP_003802.1, for example), also known as TNFSF9 or CD137L. Thus, in one embodiment, the antibody construct comprises a 4-1BB-binding domain that binds to a 4-1BB ligand and a TAA antigen-binding domain, wherein the 4-1BB-binding domain and the TAA antigen-binding domain are linked directly or indirectly to a scaffold.

[0106] As indicated above, in some embodiments, the 4-1BB×TAA antibody construct comprises a 4-1BB-binding domain that is an antigen-binding domain. Antigen-binding domains can be constructed from the sequences of antibodies that bind to the ECD of 4-1BB. Suitable antibodies include those that are known in the art, commercially available, or those that are identified and prepared according to methods well known in the art and described herein. 4-1BB antigen-binding domains may be constructed from mouse, human, humanized, or chimeric anti-4-1BB antibodies. In some embodiments, the 4-1BB antigen-binding domain is derived from an agonistic anti-4-1BB antibody, Agonistic anti-4-1BB antibodies bind to 4-1BB and are able to stimulate 4-1BB signalling activity. 4-1BB signalling activity refers to at least one of the activities that can be exhibited by 4-1BB in vitro or in vivo. For example, these activities may include stimulation of cytokine release from T or NK cells, or an increase in metabolic activity by T or NK cells, or enhancement of cytotoxic activity by T or NK cells.

[0107] Numerous antibodies that bind human 4-1BB are known in the art, for example and not limited to, utomilumab (described in WO2012/032433, Pfizer), urelumab (described in WO2004/010947 and WO2005/035584, BMS), and the antibodies described in WO 2018/156740 (Macrogenics), U.S. Pat. No. 8,337,850 (Pfizer), US 2018/0258177 (Eutilex) WO2017/077085 (Cancer Research Technologies), and WO2006126835 (University of Ulsan). Urelumab and utomilumab are exemplary agonistic anti-4-1BB antibodies.

[0108] In one embodiment, the 4-1BB×TAA antibody construct comprises a 4-1BB antigen-binding domain that can compete with one of the antibodies described in the preceding paragraph for binding to an epitope of 4-1BB ECD. In one embodiment, the 4-1BB×TAA antibody construct comprises a 4-1BB antigen-binding domain that can compete with utomilumab for binding to an epitope of 4-1BB ECD. In another embodiment, the 4-1BB×TAA antibody construct comprises a 4-1BB antigen-binding domain that can compete with urelumab for binding to an epitope of 4-1BB ECD, In yet another embodiment, the 4-1BB×TAA antibody construct comprises a 4-1BB antigen-binding domain that can compete with the anti-4-1BB antibodies described in US 8,337,850 for binding to an epitope of 4-1BB ECD. In a still further embodiment, the 4-1BB×TAA antibody construct comprises a 4-1BB antigen-binding domain that can compete with the anti-4-1BB antibodies described in US 2018/0258177 for binding to an epitope of 4-1BB ECD. In a still further embodiment, the 4-1BB×TAA antibody construct comprises a 4-1BB antigen-binding domain that can compete with the anti-4-1BB antibodies described in WO2018/156740 for binding to an epitope of 4-1BB ECD. In other embodiments, the 4-1BB×TAA antibody construct comprises a 4-1BB antigen-binding domain that binds to the same epitope of 4-1BB ECD as utomilumab, or urelumab, or any one of the anti-4-1BB antibodies described in U.S. Pat. No. 8,337,850, US 2018/0258177 or WO2018/156740.

[0109] In one embodiment, the 4-1BB×TAA antibody construct comprises a 4-1BB antigen-binding domain that binds to a 4-1BB ECD other than domain 3 or domain 4. In another embodiment, the 4-1BB×TAA antibody construct comprises a 4-1BB antigen-binding domain that binds to an epitope at least partially within amino acid residues 24-85 of the mature 4-1BB protein (SEQ ID NO:79). In one embodiment, the 4-1BB×TAA antibody construct comprises a 4-1BB antigen-binding domain that binds to domain 1 of 4-1BB. In another embodiment, the 4-1BB×TAA antibody construct comprises a 4-1BB antigen-binding domain that binds to domain 2 of 4-1BB. In one embodiment, the 4-1BB×TAA antibody construct comprises a 4-1BB antigen-binding domain that binds to domain 3 of 4-1BB. In one embodiment, the 4-1BB×TAA antibody construct comprises a 4-1BB antigen-binding domain that binds to domain 4 of 4-1BB.

[0110] In some embodiments, the 4-1BB×TAA antibody construct comprises a 4-1BB antigen-binding domain that binds to the ECD of human and cynomolgus 4-1BB.

[0111] In one embodiment, the 4-1BB×TAA antibody construct comprises a 4-1BB antigen-binding domain that comprises at least one, two, or all three heavy chain CDRs and/or at least one, two, or all three light chain CDRs of urelumab, utomilumab, or any one of the anti-4-1BB antibodies described in U.S. Pat. No. 8,337,850, US 2018/0258177 or WO2018/156740. In an alternate embodiment, the 4-1BB×TAA antibody construct comprises a 4-1BB antigen-binding domain that comprises at least one, two, or all three heavy chain CDRs and at least one, two, or all three light chain CDRs of urelumab, utomilumab, or any one of the anti-4-1BB antibodies described in U.S. Pat. No. 8,337,850, US 2018/0258177 or WO2018/156740. In other embodiments, the 4-1BB×TAA construct comprises a 4-1BB antigen-binding domain comprising a VH sequence that is at least about 80%, 85%, 90%, 95%, 96%, 97%, 98%, 99%, or 100% identical to the VH sequence of urelumab, utomilumab, or any one of the anti-4-1BB antibodies described in U.S. Pat. No. 8,337,850, US 2018/0258177 or WO2018/156740. The specific VH and VL sequences of MOR7480.1, one of the antibodies described in U.S. Pat. No. 8,337,850, are provided as SEQ ID NOs: 71 and 72, respectively, in Table 15. The CDRs of MOR7480.1 are provided in Table B below. The VH, VL and CDR sequences of the other 4-1BB antigen-binding domains described above can readily be determined by one of skill in the art with reference to the disclosures of U.S. Pat. No. 8,337,850, US 2018/0258177, WO2018/156740 WO2004/010947, WO2005/035584, US 2018/0258177, WO2017/077085, or WO2006126835.

TABLE B
MOR7480.1 CDRs

| | Defi- | | | |
|---|---|---|---|---|
| | nition | CDR1 | CDR2 | CDR3 |
| Heavy | Kabat | TYWIS | KIYPGDSYTNYSPSFQ | GYGIFDY |
| Chain | | (SEQ ID NO: | G | (SEQ ID |
| | | 358) | (SEQ ID NO: 359) | NO: 360) |
| | Chothia | GYSFSTY | YPGDSY | GYGIFDY |
| | | (SEQ ID NO: | (SEQ ID NO: 362) | (SEQ ID |
| | | 361) | | NO: 360) |
| | IMGT | GYSFSTYW | IYPGDSYT | ARGYGIFDY |
| | | (SEQ ID NO: | (SEQ ID NO: 364) | (SEQ ID |
| | | 363) | | NO: 365) |
| | AbM | GYSFSTYWIS | KIYPGDSYTN | GYGIFDY |
| | | (SEQ ID NO: | (SEQ ID NO: 367) | (SEQ ID |
| | | 366) | | NO: 360) |
| Light | Kabat | SGDNIGDQYAH | QDKNRPS | ATYTGFGSL |
| Chain | | (SEQ ID NO: | (SEQ ID NO: 369) | AV |
| | | 368) | | (SEQ ID |
| | | | | NO: 370) |
| | Chothia | SGDNIGDQYAH | QDKNRPS | ATYTGFGSL |
| | | (SEQ ID NO: | (SEQ ID NO: 369) | AV |
| | | 368) | | (SEQ ID |
| | | | | NO: 370) |
| | IMGT | NIGDQY | QDK | ATYTGFGSL |
| | | (SEQ ID NO: | | AV |
| | | 371) | | (SEQ ID |
| | | | | NO: 370) |
| | AbM | SGDNIGDQYAH | QDKNRPS | ATYTGFGSL |
| | | (SEQ ID NO: | (SEQ ID NO: 369) | AV |
| | | 368) | | (SEQ ID |
| | | | | NO: 370) |

[0112] Additional VH, VL and CDR sequences of antibodies that bind 4-1BB are described below and in Table 13; these antibodies are identified as 1B2, 1C3, I C8, 1G1, 2A7, 2E8, 2H9, 3D7, 3H1, 3E7, 3G4, 4B11, 4E6, 4F9, 4G10, 5E2, 5G8, and 6B3. In one embodiment, the 4-1BB×TAA antibody construct comprises a 4-1BB antigen-binding domain comprising a VH sequence and a VL sequence that is at least 85%, 90%, 95%, 96%, 97%, 98%, or 99% identical to the VH sequence and VL sequence of any one of antibodies 1B2, 1C3, 1C8, 1G1, 2A7, 2E8, 2H9, 3D7, 3H1, 3E7, 3G4, 4B11, 4E6, 4F9, 4F10, 5E2, 5G8, or 6B3 as set forth in Table 13. In one embodiment, the 4-1BB×TAA antibody construct comprises a 4-1BB antigen-binding domain comprising a VH sequence that is at least 85%, 90%, 95%, 96%, 97%, 98%, or 99% identical to the VH sequence of antibody 1B2 as set forth in Table 13 and a VL sequence that is at least 85%, 90%, 95%, 96%, 97%, 98%, or 99% identical to the VL sequence of antibody 1B2 as set forth in Table 13. In one embodiment, the 4-1BB×TAA antibody construct comprises a 4-1BB antigen-binding domain comprising a VH sequence that is at least 85%, 90%, 95%, 96%, 97%, 98%, or 99% identical to the VH sequence of antibody 1C3 as set forth in Table 13 and a VL sequence that is at least 85%, 90%. 95%, 96%, 97%, 98%, or 99% identical to the VL sequence of antibody 1C3 as set forth in Table 13, In one embodiment, the 4-1BB×TAA antibody construct comprises a 4-1BB antigen-binding domain comprising a VH sequence that is at least 85%, 90%, 95%, 96%, 97%, 98%, or 99% identical to the VH sequence of antibody 1C8 as set forth in Table 13 and a VL sequence that is at least 85%, 90%, 95%, 96%, 97%, 98%, or 99% identical to the VL sequence of antibody 1C8 as set forth in Table 13. In one embodiment, the 4-1BB×TAA antibody construct comprises a 4-1BB antigen-binding domain comprising a VH sequence that is at least 85%, 90%, 95%, 96%, 97%, 98% or 99% identical to the VH sequence of antibody 1G1 as set forth in Table 13 and a VL sequence that is at least 85%, 90%, 95%, 96%, 97%, 98%, or 99% identical to the VL sequence of antibody 1G1 as set forth in Table 13. In one embodiment, the 4-1BB×TAA antibody construct comprises a 4-1BB antigen-binding domain comprising a VH sequence that is at least 85%, 90%, 95%, 96%, 97%, 98%, or 99% identical to the VH sequence of antibody 2A7 as set forth in Table 13 and a VL sequence that is at least 85%, 90%, 95%, 96%, 97%, 98%, or 99% identical to the VL sequence of antibody 2A7 as set forth in Table 13. In one embodiment, the 4-1BB×TAA antibody construct comprises a 4-1BB antigen-binding domain comprising a VH sequence that is at least 85%, 90%, 95%, 96%, 97%, 98%, or 99% identical to the VH sequence of antibody 2E8 as set forth in Table 13 and a VL sequence that is at least 85%, 90%, 95%, 96%, 97%, 98%, or 99% identical to the VL sequence of antibody 2E8 as set forth in Table 13. In one embodiment, the 4-1BB×TAA antibody construct comprises a 4-1BB antigen-binding domain comprising a VH sequence that is at least 85%, 90%, 95%, 96%, 97%, 98%, or 99% identical to the VH sequence of antibody 2H9 as set forth in Table 13 and a VL sequence that is at least 85%, 90%, 95%, 96%, 97%, 98%, or 99% identical to the VL sequence of antibody 2H9 as set forth in Table 13. in one embodiment, the 4-1BB×TAA antibody construct comprises a 4-1BB antigen-binding domain comprising a VH sequence that is at least 85%, 90%, 95%, 96%, 97%, 98%, or 99% identical to the VH sequence of antibody 3D7 as set forth in Table 13 and a VL sequence that is at least 85%, 90%, 95%, 96%, 97%, 98%, or 99% identical to the VL sequence of antibody 3D7 as set forth in Table 13. In one embodiment, the 4-1BB×TAA antibody construct comprises a 4-1BB antigen-binding domain comprising a VH sequence that is at least 85%, 90%, 95%, 96%, 97%, 98%, or 99% identical to the VH sequence of antibody 3H1 as set forth in Table13 and a VL sequence that is at least 85%, 90%, 95%, 96%, 97%, 98%, or 99% identical to the VL sequence of antibody 3H1 as set forth in Table 13. In one embodiment, the 4-1BB×TAA antibody construct comprises a 4-1BB antigen-binding domain comprising a VH sequence that is at least 85%, 90%, 95%, 96%, 97%, 98%, or 99% identical to the VH sequence of antibody 3E7 as set forth in Table 13 and a VL sequence that is at least 85%, 90%, 95%, 96%, 97%, 98%, or 99% identical to the VL sequence of antibody 3E7 as set forth in Table 13. In one embodiment, the 4-1BB×TAA antibody construct comprises a 4-1BB antigen-binding domain comprising a VH sequence that is at least 85%, 90%, 95%, 96%, 97%, 98%, or 99% identical to the VH sequence of antibody 3G4 as set forth in Table 13 and a VL sequence that is at least 85%, 90%, 95%, 96%, 97%, 98%, or 99% identical to the VL sequence of antibody 3G4 as set forth in Table 13. In one embodiment, the 4-1BB×TAA antibody construct comprises a 4-1BB antigen-binding domain comprising a VH sequence that is at least 85%, 90%, 95%, 96%, 97%, 98%, or 99% identical to the VH sequence of antibody 4B11 as set forth in Table 13 and a VL sequence that is at least 85%, 90%, 95%, 96%, 97%, 98%, or 99% identical to the VL sequence of antibody 4B11 as set forth in Table 13, In one embodiment, the 4-1BB×TAA antibody construct comprises a 4-1BB antigen-binding domain comprising a VH sequence that is at least 85%, 90%, 95%. 96%, 97%, 98%, or 99% identical to the VH sequence of antibody 4E6 as set forth in Table 13 and a VL sequence that is at least 85%, 90%, 95%, 96%, 97%, 98%, or 99% identical to the VL sequence of antibody 4E6 as set forth in Table 13. In one embodiment, the 4-1BB×TAA antibody construct comprises a 4-1BB antigen-binding domain comprising a VH sequence that is at least 85%, 90%, 95%, 96%, 97%, 98%, or 99% identical to the VH sequence of antibody 4F9 as set forth in Table 13 and a VL sequence that is at least 85%, 90%, 95%, 96%, 97%, 98%, or 99% identical to the VL sequence of antibody 4F9 as set forth in Table 13. In one embodiment, the 4-1BB×TAA antibody construct comprises a 4-1BB antigen-binding domain comprising a VH sequence that is at least 85%, 90%, 95%, 96%, 97%, 98%, or 99% identical to the VH sequence of antibody 4G10 as set forth in Table 13 and a VL sequence that is at least 85%, 90%, 95%, 96%, 97%, 98%, or 99% identical to the VL sequence of antibody 4G10 as set forth in Table 13. In one embodiment, the 4-1BB×TAA antibody construct comprises a 4-1BB antigen-binding domain comprising a VH sequence that is at least 85%, 90%, 95%, 96%, 97%, 98%, or 99% identical to the VH sequence of antibody 5E2 as set forth in Table 13 and a VL sequence that is at least 85%, 90%, 96%, 97%, 98%, or 99% identical to the VL sequence of antibody 5E2 as set forth in Table 13. In one embodiment, the 4-1BB×TAA antibody construct comprises a 4-1BB antigen-binding domain comprising a VH sequence that is at least 85%, 90%, 95%, 96%, 97%, 98%, or 99% identical to the VH sequence of antibody 5G8 as set forth in Table 13 and a VL, sequence that is at least 85%, 90%, 95%, 96%, 97%, 98%, or 99% identical to the VL sequence of antibody 5G8 as set forth in Table 13. In one embodiment, the 4-1BB×TAA antibody construct comprises a 4-1BB antigen-binding domain comprising a VH sequence that is at least 85%, 90%, 95%, 96%, 97%, 98%, or 99% identical to the VH sequence of antibody 6B3 as set forth in Table 13 and a VL sequence that is at least 85%, 90%, 95%, 96%, 97%, 98%, or 99% identical to the VL sequence of antibody 6B3 as set forth in Table 13.

[0113] In one embodiment, the 4-1BB×TAA antibody construct comprises the heavy chain CDRs and light chain CDRs of one of the antibodies listed in Table 13. The CDRs of these antibodies can be found in Table 18. In related embodiments, the 4-1BB×TAA antibody construct comprises the heavy chain CDRs and light chain CDRs of any one of antibodies 1C3, 1C8, 1G1, 2E8, 3E7, 4E6, 5G-8, or 6B3, described in Table 13.

[0114] In one embodiment, the 4-1BB×TAA antibody construct comprises a 4-1BB antigen-binding domain comprising a humanized VH sequence and a humanized VL sequence of any one of antibodies 1B2, 1C3, 1C8, 1G1, 2A7, 2E8, 2H9, 3D7, 3H1, 3E7, 3G4, 4B11, 4E6, 4F9, 4G10, 5E2, 5G8, or 6B3. Several exemplary humanized VH and VL sequences are described in Table 14 and have been used in the construction of several 4-1BB antibody constructs comprising humanized VH and VL sequences based on the mouse VH and VL sequences of anti-4-1BB antibodies 1C8, 1G1, and 5G8,

[0115] In one embodiment, the 4-1BB×TAA antibody construct comprises a 4-1BB antigen-binding domain comprising a humanized VH sequence and humanized VL sequence of antibody 1C8. In a related embodiment, the 4-1BB×TAA antibody construct comprises a VH sequence that is at least 85%, 90%, 95%, 96%, 97%, 98%, or 99% identical to the VH sequence of v28726, and a VL sequence that is at least 85%, 90%, 95%, 96%, 97%, 98%, or 99% identical to the VL sequence of variants 28726. In another embodiment, the 4-1BB×TAA antibody construct comprises a VH sequence that is at least 85%, 90%, 95%, 96%, 97%, 98%, or 99% identical to the VH sequence of v28727, and a VL sequence that is at least 85%, 90%, 95%, 96%, 97%, 98%, or 99% identical to the VL sequence of variant 28727. In another embodiment, the 4-1BB×TAA antibody construct comprises a VH sequence that is at least 85%, 90%, 95%,96%, 97%, 98%, or 99% identical to the VH sequence of v28728, and a VL sequence that is at least 85%, 90%, 95%, 96%, 97%, 98%, or 99% identical to the VL sequence of variant 28728. In another embodiment, the 4-1BB×TAA antibody construct comprises a VH sequence that is at least 85%, 90%, 95%, 96%, 97%, 98%, or 99% identical to the VH sequence of v28730, and a VL sequence that is at least 85%, 90%, 95%, 96%, 97%, 98%, or 99% identical to the VL sequence of variant 28730.

[0116] In one embodiment, the 4-lBB×TAA antibody construct comprises a 4-1BB antigen-binding domain comprising a humanized VH sequence and humanized VL sequence of antibody 1G1. In a related embodiment, the 4-1BB×TAA antibody construct comprises a VH sequence that is at least 85%, 90%, 95%, 96%, 97%, 98%, or 99% identical to the VH sequence of v28683, and a VL sequence that is at least 85%, 90%, 95%, 96%, 97%, 98%, or 99% identical to the VL sequence of variants 28683. In another embodiment, the 4-1BB×TAA antibody construct comprises a VH sequence that is at least 85%, 90%, 95%, 96%. 97%, 98%, or 99% identical to the VH sequence of v28684, and a VL sequence that is at least 85%. 90%, 95%, 96%, 97%, 98%, or 99% identical to the VL sequence of variant 28684. In another embodiment, the 4-1BB×TAA antibody construct comprises a VH sequence that is at least 85%, 90%, 95%, 96%, 97%, 98%, or 99% identical to the VH sequence of v28685, and a VL sequence that is at least 85%, 90%, 95%, 96%, 97%, 98%, or 99% identical to the VL sequence of variant 28685. In another embodiment, the 4-1BB×TAA antibody construct comprises a VH sequence that is at least 85%, 90%, 95%, 96%, 97%, 98%, or 99% identical to the VH sequence of v28686, and a VL sequence that is at least 85%, 90%, 95%, 96%. 97%, 98%, or 99% identical to the VL sequence of variant 28686. In another embodiment, the 4-1BB×TAA antibody construct comprises a VH sequence that is at least 85%, 90%, 95%, 96%, 97%, 98%, or 99% identical to the VH sequence of v28687, and a VL sequence that is at least 85%, 90%, 95%, 96%, 97%, 98%, or 99% identical to the VL sequence of variant 28687. In another embodiment, the 4-1BB×TAA antibody construct comprises a VH sequence that is at least 85%, 90%, 95%, 96%, 97%, 98%, or 99% identical to the VH sequence of v28688, and a VL sequence that is at least 85%, 90%, 95%, 96%, 97%, 98%, or 99% identical to the VL sequence of variant 28688. In another embodiment, the 4-1BB×TAA antibody construct comprises a VH sequence that is at least 85%, 90%, 95%, 96%, 97%, 98%, or 99% identical to the VH sequence of v28689, and a VL sequence that is at least 85%, 90%, 95%, 96%, 97%, 98%, or 99% identical to the VL sequence of variant 28689. In another embodiment, the 4-1BB×TAA antibody construct comprises a VH sequence that is at least 85%, 90%, 95%, 96%, 97%, 98%, or 99% identical to the VH sequence of v28690, and a VL sequence that is at least 85%, 90%, 95%, 96%, 97%, 98%, or 99% identical to the VL sequence of variant 28690. In another embodiment, the 4-1BB×TAA antibody construct comprises a VH sequence that is at least 85%, 90%, 95%, 96%, 97%, 98%, or 99% identical to the VH sequence of v28691, and a VL sequence that is at least 85%, 90%, 95%, 96%, 97%, 98%, or 99% identical to the VL sequence of variant 28691. In another embodiment, the 4-1BB×TAA antibody construct comprises a VH sequence that is at least 85%, 90%, 95%, 96%, 97%, 98%, or 99% identical to the VH sequence of v28692, and a VL sequence that is at least 85%, 90%, 95%, 96%, 97%, 98%, or 99% identical to the VL sequence of variant 28692. In another embodiment, the 4-1BB×TAA antibody construct comprises a VH sequence that is at least 85%, 90%, 95%, 96%, 97%, 98%, or 99% identical to the VH sequence of v28693, and a VL sequence that is at least 85%, 90%, 95%, 96%, 97%, 98%, or 99% identical to the VL sequence of variant 28693. In another embodiment, the 4-1BB×TAA antibody construct comprises a VH sequence that is at least 85%, 90% 95%, 96%, 97%, 98%, or 99% identical to the VH sequence of v28694, and a VL sequence that is at least 85%, 90%, 95%, 96%, 97%, 98%, or 99% identical to the VL sequence of variant 28694.

[0117] In one embodiment, the 4-1BB×TAA antibody construct comprises a 4-1BB antigen-binding domain comprising a humanized VH sequence and humanized VL sequence of antibody 5C8. In a related embodiment, the 4-1BB×TAA antibody construct comprises a VH sequence that is at least 85%, 90%, 95%, 96%, 97%, 98%, or 99% identical to the VH sequence of v28700, and a VL sequence that is at least 85%, 90%, 95%, 96%, 97%, 98%, or 99% identical to the VL sequence of variants 28700. In another embodiment, the 4-1BB×TAA antibody construct comprises a VH sequence that is at least 85%, 90%, 95%, 96%, 97%, 98%, or 99% identical to the VH sequence of v28704, and a VL sequence that is at least 85%, 90%, 95%, 96%, 97%, 98%, or 99% identical to the VL sequence of variant 28704. In another embodiment, the 4-1BB×TAA antibody construct comprises a VH sequence that is at least 85%, 90%, 95%, 96%, 97%, 98%, or 99% identical to the VH sequence of v28705, and a VL sequence that is at least 85%, 90%, 95%, 96%, 97%, 98%, or 99% identical to the VL, sequence of variant 28705, In another embodiment, the 4-1BB×TAA antibody construct comprises a VH sequence that is at least 85%, 90%, 95%, 96%, 97%, 98%, or 99% identical to the VH sequence of v28706, and a VL sequence that is at least 85%, 90%, 95%, 96%, 97%, 98%, or 99% identical to the VL sequence of 28706. In another embodiment, the 4-1BB×TAA antibody construct comprises a VH sequence that is at least 85%, 90%, 95%, 96%, 97%, 98%, or 99% identical to the VH sequence of v28711, and a VL sequence that is at least 85%, 90%, 95%, 96%, 97%, 98%, or 99% identical to the VL sequence of variant 28711. In another embodiment, the 4-1BB×TAA antibody construct comprises a VH sequence that is at least 85%, 90%, 95%, 96%, 97%, 98%, or 99% identical to the VH sequence of v28712 and a VL sequence that is at least 85%, 90%, 95%, 96%, 97%, 98%, or 99% identical to the VL sequence of variant 28712. In another embodiment, the 4-1BB×TAA antibody construct comprises a VH sequence that is at least 85%, 90%, 95%, 96%, 97%, 98%, or 99% identical to the VH sequence of v28713, and a VL sequence that is at least 85%, 90%, 95%, 96%, 97%, 98%, or 99% identical to the VL sequence of variant 28713. In another embodiment, the 4-1BB×TAA antibody construct comprises a VH sequence that is at least 85%, 90%, 95%, 96%, 97%, 98%, or 99% identical to the VH sequence of v28696, and a VL sequence that is at least 85%, 90%, 95%, 96%, 97%, 98%, or 99% identical to the VL sequence of variant 28696. In another embodiment, the 4-1BB×TAA antibody construct comprises a VH sequence that is at least 85%, 90%, 95%, 96%, 97%, 98%, or 99% identical to the VH sequence of v28697, and a VL sequence that is at least 85%, 90%, 95%, 96%, 97%, 98%, or 99% identical to the VL sequence of variant 28697. In another embodiment, the 4-1BB×TAA antibody construct comprises a VH sequence that is at least 85%, 90%, 95%, 96%, 97%, 98%, or 99% identical to the VH sequence of v28698, and a VL sequence that is at least 85%, 90%, 95%, 96%, 97%, 98%, or 99% identical to the VL sequence of variant 28698. In another embodiment, the 4-1BB×TAA antibody construct comprises a VH sequence that is at least 85%, 90%, 95%, 96%, 97%, 98%, or 99% identical to the VH sequence of v28701, and a VL sequence that is at least 85%, 90%, 95%, 96%, 97%, 98%, or 99% identical to the VL sequence of variant 28701. In another embodiment, the 4-1BB×TAA antibody construct comprises a VH sequence that is at least 85%, 90%, 95%, 96%, 97%, 98%, or 99% identical to the VH sequence of v28702, and a VL sequence that is at least 85%, 90%, 95%, 96%, 97%, 98%, or 99% identical to the VL sequence of variant 28702, In another embodiment, the 4-1BB×TAA antibody construct comprises a VH sequence that is at least 85%, 90%, 95%, 96%, 97%, 98%, or 99% identical to the VH sequence of v28703, and a VL sequence that is at least 85%, 90%, 95%, 96%, 97%, 98%, or 99% identical to the VL sequence of variant 28703. In another embodiment, the 4-1BB×TAA antibody construct comprises a VH sequence that is at least 85%, 90%, 95%, 96%, 97%, 98%, or 99% identical to the VH sequence of v28707, and a VL sequence that is at least 85%, 90%, 95%, 96%, 97%, 98%, or 99% identical to the VL sequence of variant 28707.

[0118] In one embodiment, the 4-1BB×TAA antibody construct comprises the heavy chain CDRs and light chain CDRs of any one of the humanized antibodies v28726, v28727, v28728, v28730, v28700, v28704, v28705, v28706, v28711, v28712, v28713, v28696, v28697, v28698, v28701, v28702, v28703, v28707, v28683, v28684, v28685, v28686, v28687, v28688, v28689, v28690, v28691, v28692, v28694, and v28695. The CDRs of these antibodies can be found in Table 18.

[0119] In other embodiments, the 4-1BB×TAA antibody construct comprises a 4-1BB antigen-binding domain, and a TAA antigen-binding domain, wherein the 4-1BB-binding domain and the TAA antigen-binding domain are linked directly or indirectly to a scaffold, and the 4-1BB antigen-binding domain comprises one, two, or three heavy chain CDRs and/or one, two, or three light chain CDRs of v28726, v28727, v28728, v28730, v20022, v28700, v28704, v28705, v28706, v28711, v28712, v28713, v20036, v28696, v28697, v28698, v28701, v28702, v28703, v28707, v20023, v28683, v28684, v28685, v28686, v28687, v28688, v28689, v28690, v28691, v28692, v28694, and v28695.

[0120] In other embodiments, the 4-1BB×TAA antibody construct comprises a 4-1BB-binding domain that is capable of binding to an ECD of human 4-1BB and is cyno cross-reactive. The term “cyno cross-reactive” as used herein is meant to describe binding domains that bind to a target from one species (for example, human or mouse) and are able also to bind to the same target expressed in a cynomolgus monkey. In some embodiments, the antibody construct comprises a 4-1BB-binding domain that can bind to an ECD of mouse 4-1BB.

### TAAs and TAA Antigen-Binding Domains

[0121] The 4-1BB×TAA antibody constructs described herein comprise a 4-1BB-binding domain that binds to a 4-1BB extracellular domain (4-1BB ECD), and a tumor-associated antigen (TAA) antigen binding domain that binds to a TAA, wherein the 4-1BB-binding domain and the TAA antigen binding domain are linked directly or indirectly to a scaffold. In some embodiments, the 4-1BB×TAA antibody construct comprises a first TAA antigen-binding domain and a second TAA antigen-binding domain linked directly or indirectly to a scaffold.

[0122] As used herein “tumor-associated antigen” or “TAA” refers to an antigen that is expressed by cancer cells. A tumor-associated antigen may or may not be expressed by normal cells (non-tumor cells). When a TAA is not expressed by normal cells (i.e. when it is unique to tumor cells) it may also be referred to as a “tumor-specific antigen.” When a TAA is not unique to a tumor cell, it is also expressed on a normal cell under conditions that fail to induce a state of immunologic tolerance to the antigen. The expression of the antigen on the tumor may occur under conditions that enable the immune system to respond to the antigen. TAAs may be antigens that are normally present at low levels on normal cells but which are expressed at higher levels on tumor cells. Those TAAs of greatest clinical interest are differentially expressed compared to the corresponding normal tissue and allow for a preferential recognition of tumor cells by specific T-cells or immunoglobulins. In some embodiments, TAAs may be membrane-bound antigens, or antigens that are localized on the surface of a tumor cell.

[0123] In one embodiment, the 4-1BB×TAA antibody construct comprises a TAA antigen-binding domain that binds to a TAA that is expressed at high levels in tumor cells. For example, the tumor cells may express the TAA at greater than about 1 million copies per cell. In another embodiment, the 4-1BB×TAA antibody construct comprises at least one TAA antigen-binding domain that binds to a TAA that is expressed at medium levels in tumor cells. For example, the tumor cells may express the TAA at greater than about 100,000 to about 1 million copies per cell. In one embodiment, the 4-1BB×TAA antibody construct comprises at least one TAA antigen-binding domain that binds to a TAA that is expressed at low levels in tumor cells. For example, the tumor cells may express the TAA at less than about 100,000 copies per cell. In one embodiment, the 4-1BB×TAA antibody construct binds to a TAA that is expressed at higher levels on tumor cells than on normal cells.

[0124] In some embodiments the 4-1BB×TAA antibody construct binds to a TAA that is expressed on a breast cancer cell, a lung cancer cell, an ovarian cancer cell, a colon cancer cell, a skin cancer cell, a bladder cancer cell, a lymphoma or leukemic cell, a kidney cancer cell, a pancreatic cancer cell, a stomach cancer cell, an oesophageal cancer cell, a prostate cancer cell, a thyroid cancer cell or other non-liver cancer cell.

[0125] The 4-1BB×TAA antibody construct may comprise varying numbers of TAA antigen-binding domains. Accordingly, in certain embodiments, the 4-1BB×TAA antibody construct comprises a 4-1BB-binding domain and a TAA antigen-binding domain, wherein the 4-1BB-binding domains and the TAA antigen-binding domains are linked directly or indirectly to a scaffold. In other embodiments, the 4-1BB×TAA antibody construct comprises two 4-1BB-binding domains and one TAA antigen-binding domain, wherein the 4-1BB-binding domains and the TAA antigen-binding domains are linked directly or indirectly to a scaffold. In still other embodiments, the 4-1BB×TAA antibody construct comprises one or more 4-1BB-binding domains, and two TAA antigen-binding domains, wherein the 4-1BB-binding domains and the TAA antigen-binding domains are linked directly or indirectly to a scaffold. In related embodiments, where the antibody construct comprises two or more TAA antigen-binding domains, each TAA antigen-binding domain may bind to the same epitope of one TAA, or to different epitopes of the same TAA, or to different TAAs.

[0126] The TAA antigen-binding domains may be in scFv, Fab or sdAb formats. Thus, in one embodiment, the TAA antigen-binding domain of the 4-1BB×TAA antibody construct is in a Fab format. In alternate embodiments, the TAA antigen-binding domain is in a scFv format. In additional embodiments, the 4-1BB×TAA antibody construct comprises more than one TAA antigen-binding domain, wherein at least one TAA antigen-binding domain is in an scFv format. In other embodiments where the 4-1BB×TAA comprises more than one TAA antigen-binding domain, at least two of the antigen-binding domains are in the scFv format.

[0127] In one embodiment, the 4-1BB×TAA antibody construct comprises a TAA antigen-binding domain that binds to a TAA selected from, but not limited to, carbonic anhydrase IX, alpha-fetoprotein (AFP), alpha-actinin-4, A3, antigen specific for A33 antibody, ALK (anaplastic lymphoma receptor tyrosine kinase), ART-4, B7, B7, B7-H4, Ba 733, BAGE, BCMA, BrE3-antigen, CA125, CAMEL, CAP-1, CASP-8/m, CCL19, CCL21, CD1, CD1a, CD2, CD3, CD4, CD5, CD8, CD11A, CD14, CD15, CD16, CD18, CD19, CD20, CD21, CD22, Cd23. CD25, CD29, CD30, CD32b, CD33, CD37, CD38, CD40, CD40L, CD44, CD45, CD46, CD52, CD54, CD55, CD59, CD64, CD66a-e, CD67, CD70, CD70L, CD74, CD79a, CD79b, CD80, CD83, CD95, CD123, CD126, CD132, CD133, CD138, CD147, CD154, CD171, CDC27, CDK-4/m, CDKN2A, CSF1R, CTLA-4, CXCR4, CXCR7, CXCL12, HIF-1a, colon-specific antigen-p (CSAp), CEA, CEACAMS, CEACAM6, c-Met, DAM, DL3, EGFR, EGFRvIII, EGP-1 (TROP-2), EGP-2, ELF2-M, Ep-CAM, EphA2, fibroblast growth factor (FGF), Flt-1, Flt-3, folate receptor, G250 antigen, GAGE, GD2, gp100, GPC3, GRO-13, HLA-DR, HM1.24, human chorionic gonadotropin (HCG) and its subunits, HER2/neu, HMGB-1, hypoxia inducible factor (HIF-I), HSP70-2M, HST-2, Ia. IGF-1R, IFN-gamma, IFN-alpha, IFN-beta, IFN-X, IL-4R, IL-6R, IL-13R, IL13Ralpha2, IL-15R, IL-17R, IL-18R, IL-2, IL-6, IL-8, IL-12, IL-15, IL-17, IL-18, IL-23, IL-25, insulin-like growth factor-1 (IGF-1), KC4-antigen, KS-1-antigen, KS1-4, Le-Y, LDR-/FUT macrophage migration inhibitory factor (MIF), MAGE, MAGE-3, MART-1, MART-2, mCRP, MCP-1, melanoma glycoprotein, mesothelin, MIP-1A, MIP-1B, MIF, MUC1, MUC2, MUC3, MUC4, MUC5ac, MUC 13, MUC16, MUM-1/2, MUM-3, NaPi2B, NCA66, NCA95, NCA90, NY-ESO-1, PAM4 antigen, pancreatic cancer mucin, PD-1, PD-1 receptor, placental growth factor, p53, PLAGL2, prostatic acid phosphatase, PSA, PRAME, PSMA, P1GF, ILGF, ILGF-1R, IL-6, IL-25, RS5, RANTES, ROR1, T101, SAGE, 5100. survivin, survivin-2B, TAC, TAG-72, tenascin, TRAG-3, TRAIL receptors, TGFβ, TNF-alpha, Tn antigen, Thomson-Friedenreich antigens, tumor necrosis antigens, VEGFR, ED-B fibronectin, WT-1, 17-1A-antigen, complement factors C3, C3a, C3b, C5a, C5, an angiogenesis marker, bcl-2, bcl-6, Kras, an oncogene marker and an oncogene product (see, e.g., Sensi et al., Clin Cancer Res 2006, 12:5023-32; Parmiani et al., J Immunol 2007, 178:1975-79; Novellino et al. Cancer Immunol Immunother 2005, 54:187-207).

[0128] In one embodiment, the 4-1BB×TAA antibody constructs described herein comprise a 4-1BB-binding, domain that binds to a 4-1BB extracellular domain (4-1BB ECD), and a TAA antigen-binding domain that binds to folate receptor (FRα), wherein the first 4-1BB-binding domain and the TAA antigen binding domain are linked directly or indirectly to a scaffold. In one embodiment, the 4-1BB×TAA antibody constructs described herein comprise a 4-1BB-binding domain that binds to a 4-1BB extracellular domain (4-1BB ECD), and a tumor-associated antigen (TAA)-antigen binding domain that binds to Solute Carrier Family 34 Member 2 (SLC34A2, NaPi2b), wherein the first 4-1BB-binding domain and the TAA antigen binding domain are linked directly or indirectly to a scaffold. In one embodiment, the 4-1BB×TAA antibody constructs described herein comprise a 4-1BB-binding domain that binds to a 4-1BB extracellular domain (4-1BB ECD), and a tumor-associated antigen (TAA)-antigen binding domain that binds to HER2, wherein the first 4-1BB-binding domain and the TAA antigen binding domain are linked directly or indirectly to a scaffold. In one embodiment, the 4-1BB×TAA antibody constructs described herein comprise a 4-1BB-binding domain that binds to a 4-1BB extracellular domain (4-1BB ECD), and a tumor-associated antigen (TAA)-antigen binding domain that binds to mesothelin, wherein the first 4-1BB-binding domain and the TAA antigen binding domain are linked directly or indirectly to a scaffold. In one embodiment, the 4-1BB×TAA antibody constructs described herein comprise a 4-1BB-binding domain that hinds to a 4-1BB extracellular domain (4-1BB ECD), and a tumor-associated antigen (TAA)-antigen binding domain that binds to Solute Carrier Family 39 Member 6 (SLC3A6, LIV-1), wherein the first 4-1BB-binding domain and the TAA antigen binding domain are linked directly or indirectly to a scaffold.

[0129] The TAA antigen-binding domains may be constructed from the sequences of known antibodies directed against TAAs. Many such antibodies are known in the art and may be commercially obtained from a number of sources. For example, a variety of antibody secreting hybridoma lines are available from the American Type Culture Collection (ATCC, Manassas, Va.) In addition, a number of antibodies against various TAAs have been deposited at the ATCC and/or have published variable domain sequences and may be used to prepare the TAA antigen-binding domains of the antibody constructs. The skilled artisan will appreciate that antibody sequences or antibody-secreting hybridomas against various TAAs may be obtained by a simple search of the ATCC, NCBI, and/or USPTO databases. Alternatively, antibodies that specifically bind to a desired TAA may be generated according to methods known in the art and described elsewhere herein.

### FRα Antigen-Binding Domains

[0130] In one embodiment, the 4-1BB×TAA antibody construct is a 4-1BB×FRα antibody construct comprising a 4-1.BB antigen-binding domain and a FRα antigen-binding domain wherein the 4-1BB binding domain and the Frα antigen-binding domain are linked directly or indirectly to a scaffold.

[0131] FRα is a member of the folate receptor family which functions to bind folic acid and transports 5-methyltetrahydrofolate into cells. FRα is also known as folate receptor 1, FOLR, FOLR1, FBP or MOv18 and is expressed in normal cells as well as tumor cells as a secreted protein that exists in soluble form or is anchored to the membrane of cells through a glycosyl-phosphatidylinositol (GPI) linkage. FRα is further described in Cheung et al. (2016) Oncotarget 7:52553-52574. The polypeptide sequence of this protein is described in GenBank Accession No, AAB05827.1 and UniProt P15328, and provided here as SEQ ID NO:80.

[0132] FRα antigen-binding domains may be derived from anti-FRα antibodies known in the art, including but not limited to: farletuzumab (Morphotek, described in WO2004/003388 and WO2005/080431), mirvetuximab (ImmunoGen, described in WO2011106528). Other anti-FRα antibodies are described in U.S. Pat. No. 8,388,972 (Advanced Accelerator Applications), WO2018/098277 (Eisai R&D Management Co.), U.S. Pat. No. 9,695,237 (Kyowa Hakko Kirin Co.), WO2015/196167 (Bioalliance), WO2016/079076 (Roche), and WO2018/071597 (Sutro), 1001321 In one embodiment, the 4-1BB×TAA antibody construct comprises a FRα antigen-binding domain that can compete with farletuzumab for binding to an epitope of FRα. In another embodiment, the 4-1BB×TAA antibody construct comprises a FRα antigen-binding domain that can compete with mirvetuximab for binding to an epitope of Rα. In still other embodiments, the 4-1BB×TAA antibody construct comprises a FRα antigen-binding domain that can compete for binding to an epitope of FRα with any one of the anti-FRα antibodies described in U.S. Pat. No. 8,388,972, WO2018/098277, U.S. Pat. No. 9,695,237, WO2015/196167, WO2016/079076, or WO2018/071597.

[0133] In other embodiments, the 4-1BB×TAA antibody construct comprises a FRα antigen-binding domain that binds to the same epitope of FRα as farletuzumab or mirvetuximab, or any one of the FRα antibodies described in U.S. Pat. No. 8,388,972, WO2018/098277, U.S. Pat. No. 9,695,237, WO2015/196167, WO2016/079076, or WO2018/071597.

[0134] In one embodiment, the 4-1BB×TAA antibody construct comprises an FRα antigen-binding domain that comprises at least one, two, or all three heavy chain CDRs and/or at least one, two, or all three light chain CDRs of farletuzumab, mirvetuximab, or any one of the anti-FRα antibodies described in U.S. Pat. No. 8,388,972, WO2018/098277, U.S. Pat. No. 9,695,237, WO2.015/196167, WO2016/079076, or WO2018/071597. In an alternate embodiment, the 4-1BB×TAA antibody construct comprises a FRα antigen-binding domain that comprises at least one, two, or all three heavy chain CDRs and at least one, two, or all three light chain CDRs of farletuzumab, mirvetuximab, or any one of the anti-FRα antibodies described in U.S. Pat. No. 8,388,972, WO2018/098277, U.S. Pat. No. 9,695,237, WO2015/196167, WO2016/079076, or WO2018/071597, In other embodiments, the 4-1BB×TAA construct comprises a FRα antigen-binding domain comprising a VH sequence that is at least about 80%, 85%, 90%, 95%, 96%, 97%, 98%, 99%, or 100% identical to the VH sequence of farletuzumab, mirvetuximab, or any one of the anti-FRα antibodies described in U.S. Pat. No. 8,388,972, WO2018/098277, U.S. Pat. No. 9,695,237, WO2015/196167, WO2016/079076, or WO2018/071597. The specific sequences of the CDRs for mirvetuximab and farletuzumab are described in Table C and the VH and VL sequences of these antibodies are provided in Table 17; the others can readily be determined by one of skill in the art with reference to the disclosures of U.S. Pat. No. 8,388,972, WO2018/098277, U.S. Pat. No. 9,695,237, WO2015/196167, WO2016/079076, or WO2018/071597.

TABLE C
CDR sequences of exemplary anti-FRα antibodies

| | | | |
|---|---|---|---|
| Defi- | | | |
| nition | CDR1 | CDR2 | CDR3 |

Mirvetuximab

| | | | | |
|---|---|---|---|---|
| Heavy | Kabat | GYFMN | RIHPYDGDTFY | YDGSRAMDY |
| chain | | (SEQ ID | NQKFQG (SEQ | (SEQ ID NO: |
| | | NO: 372) | ID NO: 373) | 374) |
| | Chothia | GYTFTGY | HPYDGD | YDGSRAMDY |
| | | (SEQ ID | (SEQ ID NO: | (SEQ ID NO: |
| | | NO: 375) | 376) | 374) |
| | IMGT | GYTFTGYF | IHPYDGDT | TRYDGSRAMDY |
| | | (SEQ ID | (SEQ ID NO: | (SEQ ID NO: |
| | | NO: 377) | 378) | 379) |
| | AbM | GYTFTGYFMN | RIHPYDGDTF | YDGSRAMDY |
| | | (SEQ ID | (SEQ ID NO: | (SEQ ID NO: |
| | | NO: 380) | 381) | 374) |
| Light | Kabat | KASQSVSFAG | RASNLEA | QQSREYPYT |
| chain | | TSLMH (SEQ | (SEQ ID NO: | (SEQ ID NO: |
| | | ID NO: 382) | 383) | 384) |
| | Chothia | KASQSVSFAG | RASNLEA | QQSREYPYT |
| | | TSLMH (SEQ | (SEQ ID NO: | (SEQ ID NO: |
| | | ID NO: 382) | 383) | 384) |
| | IMGT | QSVSFAGTSL | RAS | QQSREYPYT |
| | | (SEQ ID NO: | (SEQ ID NO: | |
| | | 385) | 384) | |
| | AbM | KASQSVSFAG | RASNLEA | QQSREYPYT |
| | | TSLMH (SEQ | (SEQ ID NO: | (SEQ ID NO: |
| | | ID NO: 382) | 383) | 384) |

Farletuzumab

| | | | | |
|---|---|---|---|---|
| Heavy | Kabat | GYGLS | MISSGGSYTYY ADSVKG | HGDDPAWFAY |
| chain | | (SEQ ID | (SEQ ID NO: | (SEQ ID NO: |
| | | NO: 386) | 387) | 388) |
| | Chothia | GFTFSGY | SSGGSY | HGDDPAWFAY |
| | | (SEQ ID | (SEQ ID NO: | (SEQ ID NO: |
| | | NO: 389) | 390) | 388) |
| | IMGT | GFTFSGYG | ISSGGSYT | ARHGDDPAWFAY |
| | | (SEQ ID | (SEQ ID NO: | (SEQ ID NO: |
| | | NO: 391) | 392) | 393) |
| | AbM | GFTFSGYGLS | MISSGGSYTY | HGDDPAWFAY |
| | | (SEQ ID | (SEQ ID NO: | (SEQ ID NO: |
| | | NO: 394) | 395) | 388) |
| Light | Kabat | SVSSSISSNNLH | GTSNLAS | QQWSSYPYMYT |
| chain | | (SEQ ID | (SEQ ID NO: | (SEQ ID NO: |
| | | NO: 396) | 397) | 398) |
| | Chothia | SVSSSISSNNLH | GTSNLAS | QQWSSYPYMYT |
| | | (SEQ ID | (SEQ ID NO: | (SEQ ID NO: |
| | | NO: 396) | 397) | 398) |
| | IMGT | SSISSNN | QQWSSYPYMYT | |
| | | (SEQ ID | GTS | (SEQ ID NO: |
| | | NO: 399) | | 398) |
| | AbM | SVSSSISSNNLH | GTSNLAS | QQWSSYPYMYT |
| | | (SEQ ID NO: | (SEQ ID NO: | (SEQ ID NO: |
| | | 396) | 397) | 398) |

[0135] Alternatively, FRα antigen-binding domains may be derived from novel antibodies that are generated according to methods known in the art.

[0136] Additional anti-FRα antibody VH and VL sequences are provided in Table 17. In one embodiment, the 4-1BB×FRα antibody construct comprises a FRα antigen-binding domain having a sequence that is at least 85%, 90%, 95%, 96%. 97%, 98%, or 99% identical to the VH sequence of antibody 8K22 or 1H06 and a VL sequence that is at least 85%, 90%, 95%, 96%, 97%. 98%, or 99% identical to the VL sequence of antibody 8K22 or 1H06. The CDRs of these antibodies are provided in Table 18. In one embodiment, the 4-1BB×TAA antibody construct comprises the heavy chain CDRs and light chain CDRs of antibody 8K22 or 1H06.

[0137] In one embodiment, the 4-1BB×FRα antibody construct comprises a 4-1BB antigen-binding domain comprising the CDRs of any one of the humanized antibodies v28726, v28727, y28728, v28730, v28700, y28704, v28705, v28706, y28711, v28712, v28713, v28696, y28697, v28698, v28701, y28702, v28703, v28707, y28683, v28684, v28685, v28686, v28687, v28688, v28689, v28690, v28691, v28692, v28694, and v28695 and a FRα antigen-binding domain linked to scaffold. In one embodiment, the 4-1BB×antibody construct comprises a 4-1BB antigen-binding domain comprising the CDRs of any one of the humanized antibodies v28726, v28727, v28728, v28730, v28700, v28704, v28705, v28706, v28711, v28712, v28713, v28696, v28697, v28698, v28701, v28702, v28703, v28707, v28683, v28684, v28685, v28686, v28687, v28688, v28689, v28690, v28691, v28692, v28694, and v28695 and a FRα antigen-binding domain comprising the CDRs of 8K22 or 1H06.

### SLC34A2/NaPi2b Antigen-Binding Domains

[0138] In one embodiment, the 4-1BB×TAA antibody construct is a 4-1BB×NaPi2b antibody construct comprising a 4-1BB antigen-binding domain and a NaPi2b antigen-binding domain wherein the 4-1BB binding domain and the NaPi2b antigen-binding domain are linked directly or indirectly to a scaffold.

[0139] SLC34A2 is a pH-sensitive sodium-dependent phosphate transporter. Also known as NaPi2b as well as NAPI-3B, NAPI-IIb, NPTIIb, this protein is expressed in some normal epithelial cells in the lung, gut and mammary gland and has a function in transporting phosphate ions. NaPi2b is found highly expressed on tumor cells, primarily in lung and ovarian cancers (Lin K et al, Clin Cancer Res. 2015 Nov. 15; 21(22):5139-50). NaPi2b is a multispan membrane protein, with extracellular domains of 14, 129, 57 and 6 amino acids. The polypeptide sequence of this protein is described in NGBI Reference Sequence: NP_001171470.1 and UniProt O95436, and provided herein as SEQ ID NO:81

[0140] NaPi2b antigen-binding domains may be derived from antibodies known in the art, including but not limited to: lifastuzumab (Genentech, Seattle Genetics, described in WO2011/066503), MX-35 (Ludwig Institute, described in WO2009/097128), and the antibodies described by Mersana Therapeutics in US2017/0266311. Alternatively, NaPi2b antigen-binding domains may be derived from novel antibodies that are generated according to methods known in the art and described elsewhere herein.

[0141] In one embodiment, the 4-1BB×TAA antibody construct comprises an NaPi2b antigen-binding domain that can compete with lifastuzumab for binding to an epitope of NaPi2b. In another embodiment, the 4-1BB×TAA antibody construct comprises an NaPi2b antigen-binding domain that can compete with MX-35 for binding to an epitope of NaPi2b. In still other embodiments, the 4-1BB×TAA antibody construct comprises an NaPi2b antigen-binding domain that can compete for binding to an epitope of NaPi2b with any one of the anti-NaPi2b antibodies described in WO2011/066503, WO2009/097128, or US2017/0266311.

[0142] In other embodiments, the 4-lBB×TAA antibody construct comprises an NaPi2b antigen-binding domain that binds to the same epitope of NaPi2b as lifastuzumab or MX-35, or any one of the anti-NaPi2b antibodies described in WO2011/066503, WO2009/097128, or US2017/0266311.

[0143] In one embodiment, the 4-1BB×TAA antibody construct comprises an NaPi2b antigen-binding domain that comprises at least one, two, or all three heavy chain CDRs and/or at least one, two, or all three light chain CDRs of lifastuzumab or MX-35, or any one of the anti-NaPi2b antibodies described in WO2011/066503, WO2009/097128, or US2017/0266311. In an alternate embodiment, the 4-1BB×TAA antibody construct comprises an NaPi2b antigen-binding domain that comprises at least one, two, or all three heavy chain CDRs and at least one, two, or all three light chain CDRs of lifastuzumab or MX-35, or any one of the anti-NaPi2b antibodies described in WO2011/066503, WO2009/097128, or US2017/026631 In other embodiments, the 4-1BB×TAA construct comprises an NaPi2b antigen-binding domain comprising a VH sequence that is at least about 80%, 85%, 90%, 95%, 96%, 97%, 98%, 99%, or 100% identical to the VH sequence of lifastuzumab or MX-35, or any one of the anti-NaPi2b antibodies described in WO2011/066503, WO2009/097128, or US2017/0266311. The specific sequences of the CDRs of exemplary anti-NaPi2b antibodies are described in Table D; the VH and VL sequences of these antibodies are found in Table 17. Other anti-NaPi2b antibody sequences can readily be determined by one of skill in the art with reference to the disclosures of WO2011/066503, WO2009/097128, or US2017/0266311.

TABLE D
CDR sequences of exemplary anti-NaPi2b antibodies

| | | | |
|---|---|---|---|
| Defi- | | | |
| nition | CDR1 | CDR2 | CDR3 |

Lifastuzumab

| | | | | |
|---|---|---|---|---|
| Heavy | Kabat | DFAMS | TIGRVAFHTY | HRGFDVGHFDF |
| chain | | (SEQ ID | YPDSMKG (SEQ | (SEQ ID NO: |
| | | NO: 400) | ID NO: 401) | 402) |
| | Chothia | GFSFSDF | GRVAFH | HRGFDVGHFDF |
| | | (SEQ ID | (SEQ ID NO: | (SEQ ID NO: |
| | | NO: 403) | 404) | 402) |
| | IMGT | GFSFSDFA | IGRVAFHT | ARHRGFDVGHFDF |
| | | (SEQ ID | (SEQ ID NO: | (SEQ ID NO: |
| | | NO: 405) | 406) | 407) |
| | AbM | GFSFSDFAMS | TIGRVAFHTY | HRGFDVGHFDF |
| | | (SEQ ID | (SEQ ID NO: | (SEQ ID NO: |
| | | NO: 408) | 409) | 402) |
| Light | Kabat | RSSETLVHSS | RVSNRFS | FQGSFNPLT |
| chain | | GNTYLE | (SEQ ID NO: | (SEQ ID NO: |
| | | (SEQ ID | 411) | 412) |
| | | NO: 410) | | |
| | Chothia | RSSETLVHSS | RVSNRFS | FQGSFNPLT |
| | | GNTYLE | (SEQ ID NO: | (SEQ ID NO: |
| | | (SEQ ID | 411) | 412) |
| | | NO: 410) | | |
| | IMGT | ETLVHSSGN | RVS | FQGSFNPLT |
| | | TY (SEQ ID | | (SEQ ID NO: |
| | | NO: 468) | | 412) |
| | AbM | RSSETLVHSS | RVSNRFS | FQGSFNPLT |
| | | GNTYLE | (SEQ ID NO: | (SEQ ID NO: |
| | | (SEQ ID | 411) | 412) |
| | | NO: 410) | | |

MX-35

| | | | | |
|---|---|---|---|---|
| Heavy | Kabat | GYNIH | AIYPGNGDTS | GETARATFAY |
| chain | | (SEQ ID | YKQKFRG (SEQ | (SEQ ID NO: |
| | | NO: 413) | ID NO: 414) | 415) |
| | Chothia | GYTFTGY | YPGNGD | GETARATFAY |
| | | (SEQ ID | (SEQ ID NO: | (SEQ ID NO: |
| | | NO: 416) | 417) | 415) |
| | IMGT | GYTFTGYN | IYPGNGDT | ARGETARATFAY |
| | | (SEQ ID | (SEQ ID NO : | (SEQ ID NO: |
| | | NO: 418) | 419) | 420) |
| | AbM | GYTFTGYNIH | AIYPGNGDTS | GETARATFAY |
| | | (SEQ ID | (SEQ ID NO: | (SEQ ID NO: |
| | | NO: 421) | 422) | 415) |
| Light | Kabat | SASQDIGNF | YTSSLYS | QQYSKLPLT |
| chain | | LN (SEQ ID | (SEQ ID NO: | (SEQ ID NO: |
| | | NO: 423) | 424) | 425) |
| | Chothia | SASQDIGNF | YTSSLYS | QQYSKLPLT |
| | | LN (SEQ ID | (SEQ ID NO: | (SEQ ID NO: |
| | | NO: 423) | 424) | 425) |
| | IMGT | QDIGNF | YTS | QQYSKLPLT |
| | | (SEQ ID | | (SEQ ID NO: |
| | | NO: 469) | | 425) |
| | AbM | SASQDIGNF | YTSSLYS | QQYSKLPLT |
| | | LN (SEQ | (SEQ ID NO: | (SEQ ID NO: |
| | | ID NO: | 424) | 425) |
| | | 423) | | |

[0144] Alternatively, NaPi2b antigen-binding domains may be derived from novel antibodies that are generated according to methods known in the art.

### HER2 Antigen-Binding Domains

[0145] In one embodiment, the 4-1BB×TAA antibody construct is a 4-1BB×HER2 antibody construct comprising a 4-1BB antigen-binding domain and a HER2 antigen-binding domain wherein the 4-1BB binding domain and the RER2 antigen-binding domain are linked directly or indirectly to a scaffold.

[0146] HER2 (also known as ErbB2) is a receptor protein tyrosine kinase which belongs to the human epidermal growth factor receptor (HER) family which includes EGFR, HER2, HER3 and HER4 receptors. The extracellular (ecto) domain of HER2 comprises four domains, Domain I (ECD1, amino acid residues from about 1-195), Domain II (ECD2, amino acid residues from about 196-319), Domain III (ECD3, amino acid residues from about 320-488), and Domain IV (ECD4, amino acid residues from about 489-630) (residue numbering without signal peptide). See Garrett et al. Mol. Cell. 11: 495-505 (2003), Cho et al. Nature 421: 756-760 (2003), Franklin et al. Cancer Cell 5:317-328 (2004). Tse et al. Cancer Treat Rev. 2012 April; 38(2):133-42 (2012), or Proc. Natl. Acad. Sci. 90:1746-1750 (1993). The polypeptide sequence of HER2 is described in UniProt P04626 and included herein as SEQ ID NO:82.

[0147] HER2 antigen-binding domains may be derived from antibodies known in the art, including but not limited to: trastuzumab (Genentech, described for example in U.S. Pat. Nos. 5,821.337. and 6,528,624), or pertuzurnab (Genentech, U.S. Pat. No. 7,862,217). The online Therapeutic Antibodies Database (Tabs, hosted by Craic Computing LLC, tabs.craic.com) identifies many additional anti-HER2 antibodies that provide suitable sequences for preparing; the anti-HER2 antigen-binding domains of the 4-1BB×TAA antibody construct.

[0148] In one embodiment, the 4-1BB×TAA antibody construct comprises a HER2 antigen-binding domain that can compete with trastuzumab for binding to an epitope of HER2. In another embodiment, the 4-1BB×TAA antibody construct comprises a HER2 antigen-binding domain that can compete with pertuzumab for binding to an epitope of HER2. In still other embodiments, the 4-1BB×TAA antibody construct comprises a HER2 antigen-binding domain that can compete for binding to an epitope of HER2 with any one of the anti-HER2 antibodies described in U.S. Pat. Nos. 5,821,337, 6,528,624, or 7,862,217.

[0149] In other embodiments, the 4-1BB×TAA antibody construct comprises a HER2 antigen-binding domain that binds to the same epitope of HER2 as trastuzumab or pertuzumab, or any one of the anti-HER2 antibodies described in U.S. Pat. Nos. 5,821,337, 6,528,624, or 7,862,217.

[0150] In one embodiment, the 4-1BB×TAA antibody construct comprises a HER2 antigen-binding domain that comprises at least one, two, or all three heavy chain CDRs and/or at least one, two, or all three light chain CDRs of trastuzumab or pertuzumab or margetuximab, or any one of the anti-HER2 antibodies described in U.S. Pat. Nos. 5,821,337, 6,528,624, or 7,862,217. In an alternate embodiment, the 4-1BB×TAA antibody construct comprises HER2 antigen-binding domain that comprises at least one, two, or all three heavy chain CDRs and at least one, two, or all three light chain CDRs of trastuzumab or pertuzumab or margetuximab, or any one of the anti-HER2 antibodies described in U.S. Pat. Nos. 5,821,337, 6,528,624, or 7,862.217. 1n other embodiments, the 4-1BB×TAA construct comprises a HER2 antigen-binding domain comprising a VH sequence that is at least about 80%, 85%, 90%, 95%, 96%, 97%, 98%, 99%, or 100% identical to the VH sequence of trastuzumab or pertuzumab or margetuximab, or any one of the anti-HER2 antibodies described in U.S. Pat. Nos. 5,821,337, 6,528,624, or 7,862,217. The specific sequences of the CDRs of exemplary anti HER2 antibodies are described in Table E; the VH and VL sequences of these antibodies are found in Table 17. Other anti-HER2 antibody sequences can readily be determined by one of skill in the art with reference at least to the disclosures of WO2011/066503, WO2009/097128, or US2017/0266311.

TABLE E
CDR sequences of exemplary anti-HER2 antibodies

| | | | |
|---|---|---|---|
| Defi- | | | |
| nition | CDR1 | CDR2 | CDR3 |

trastuzumab

| | | | | |
|---|---|---|---|---|
| Heavy | Kabat | DTYIH | RIYPTNGYTR | WGGDGFYAMDY |
| chain | | (SEQ ID | YADSVKG (SEQ | (SEQ ID NO: |
| | | NO: 426) | ID NO: 427) | 428) |
| | Chothia | GFNIKDT | YPTNGY | WGGDGFYAMDY |
| | | (SEQ ID | (SEQ ID NO: | (SEQ ID NO: |
| | | NO: 429) | 430) | 428) |
| | IMGT | GFNIKDTY | IYPTNGYT | SRWGGDGFYAMDY |
| | | (SEQ ID | (SEQ ID NO: | (SEQ ID NO: |
| | | NO: 431) | 432) | 433) |
| | AbM | GFNIKDTY | RIYPTNGYTR | WGGDGFYAMDY |
| | | IH (SEQ | (SEQ ID NO: | (SEQ ID NO: |
| | | ID NO: | 435) | 428) |
| | | 434) | | |
| Light | Kabat | RASQDVNT | SASFLYS | QQHYTTPPT |
| chain | | AVA (SEQ | (SEQ ID NO: | (SEQ ID NO: |
| | | ID NO: | 437) | 438) |
| | | 436) | | |
| | Chothia | RASQDVNT | SASFLYS | QQHYTTPPT |
| | | AVA (SEQ | (SEQ ID NO: | (SEQ ID NO: |
| | | ID NO: | 437) | 438) |
| | | 436) | | |
| | IMGT | QDVNTA | QQHYTTPPT | |
| | | (SEQ ID | SAS | (SEQ ID NO: |
| | | NO: 439) | | 438) |
| | AbM | RASQDVNT | SASFLYS | QQHYTTPPT |
| | | AVA (SEQ | (SEQ ID NO: | (SEQ ID NO: |
| | | ID NO: | 437) | 438) |
| | | 436) | | |

pertuzumab

| | | | | |
|---|---|---|---|---|
| Heavy | Kabat | DYTMD | DVNPNSGGSI | NIGPSFYFDY |
| chain | | (SEQ ID | YNQRFKG (SEQ | (SEQ ID NO: |
| | | NO: 440) | ID NO: 441) | 442) |
| | Chothia | GFTFTDY | NPNSGG | NLGPSFYFDY |
| | | (SEQ ID | (SEQ ID NO: | (SEQ ID NO: |
| | | NO: 443) | 444) | 442) |
| | IMGT | GFTFTDYT | VNPNSGGS | ARNLGPSFYFDY |
| | | (SEQ ID | (SEQ ID NO: | (SEQ ID NO: |
| | | NO: 445) | 446) | 447) |
| | AbM | GFTFTDYT | DVNPNSGGSI | NLGPSFYEDY |
| | | MD (SEQ | (SEQ ID NO: | (SEQ ID NO: |
| | | ID NO: | 449) | 442) |
| | | 448) | | |
| Light | Kabat | KASQDVSI | SASYRYT | QQYYIYPYT |
| chain | | GVA (SEQ | (SEQ ID NO: | (SEQ ID NO: |
| | | ID NO: | 451) | 452) |
| | | 450) | | |
| | Chothia | KASQDVSI | SASYRYT | QQYYIYPYT |
| | | GVA (SEQ | (SEQ ID NO: | (SEQ ID NO: |
| | | ID NO: | 451) | 452) |
| | | 450) | | |
| | IMGT | QDVSIG | SAS | QQYYIYPYT |
| | | (SEQ ID | | (SEQ ID NO: |
| | | NO: 453) | | 452) |
| | AbM | KASQDVSI | SASYRYT | QQYYIYPYT |
| | | GVA (SEQ | (SEQ ID NO: | (SEQ ID NO: |
| | | ID NO: | 451) | 452) |
| | | 450) | | |

[0151] Alternatively, HER2 antigen-binding domains may be derived from novel antibodies that are generated according to methods known in the art.

### SLC39A6/LIV-1 Antigen-Binding Domains

[0152] In one embodiment, the 4-1BB x TAA antibody construct is a 4-1BB×LIV-1 antibody construct comprising a 4-1BB antigen-binding domain and a LIV-1 antigen-binding domain wherein the 4-1BB binding domain and the LIV-1 antigen-binding domain are linked directly or indirectly to a scaffold.

[0153] SLC39A6, also known as LIV-1 or ZIP6, belongs to a family of proteins that function as zinc transporters. It is expressed at low levels on normal cells throughout the body but is expressed at high levels on some tumor cells, particularly breast cancers (Takatani-Nakase et al., (2016) Biomed Res Clin Prac 1:71-75). The polypeptide sequence of LI V-1 is described in UniProt Accession Number Q13433 and included herein as SEQ ID NO:83.

[0154] LIV-1 antigen-binding domains may be derived from antibodies known in the art, including but not limited to those described in WO 2012/078688 (Seattle Genetics), WO 2004/067564 (Abbvie), and WO 2001/055178 (Genentech). Other antibodies that bind to LIV-1 are described in US2008/0175839.

[0155] In one embodiment, the 4-1BB×TAA antibody construct comprises a LIV-1 antigen-binding domain that can compete for binding to an epitope of LIV-1 with any one of the antibodies described in WO 2012/078688, WO 2004/067564, WO 2001/055178, or US2008/0175839. In another embodiment, the 4-1BB×TAA antibody construct comprises a LIV-1 that can compete for binding to an epitope of LIV-1 with any one of the anti-LIV-1 antibodies described in WO 2012/078688, WO 2004/067564, WO 2001/055178, or US2008/0175839.

[0156] In other embodiments, the 4-1BB×TAA antibody construct comprises a LIV-1 antigen-binding domain that binds to the same epitope of LIV-1. as any one of the anti-LIV-1 antibodies described in WO 2012/078688, WO 2004/067564, WO 2001/055178, or US2008/0175839.

[0157] In one embodiment, the 4-1BB×TAA antibody construct comprises an LIV-1 antigen-binding domain that comprises at least one, two, or all three heavy chain CDRs and/or at least one, two, or all three light chain CDRs of any one of the anti-LIV-1 antibodies described in WO 2012/078688, WO 2004/067564, WO 2001/055178, or US2008/0175839. In an alternate embodiment, the 4-11BB×TAA antibody construct comprises an LIV-1 antigen-binding domain that comprises at least one, two, or all three heavy chain CDRs and at least one, two, or all three light chain CDRs of any one of the anti-LIV-1 antibodies described in WO 2012/078688, WO 2004/067564, WO 2001/055178, or US2008/0175839. In other embodiments, the 4-1BB×TAA construct comprises a LIV-1 antigen-binding domain comprising a VH sequence that is at least about 80%, 85%, 90%, 95%, 96%, 97%, 98%, 99%, or 100% identical to the VH sequence of any one of the anti-LIV-1 antibodies described in WO 2012/078688, WO 2004/067564, WO 2001/055178, or US2008/0175839. The specific sequences of the CDRs, VHs, and VLs for exemplary anti-LIV-1 antibodies are described in the disclosures of WO2011/066503, WO2009/097128, or US2017/0266311.

[0158] Alternatively, LIV-1 antigen-binding domains may be derived from novel antibodies that are generated according to methods known in the art and described elsewhere herein.

### Mesothelin (MSLN) Antigen-Binding Domains

[0159] In one embodiment, the 4-1BB×TAA antibody construct is a 4-1BB×MSLN antibody construct comprising a 4-1BB antigen-binding domain and a MSLN antigen-binding domain wherein the 4-1BB binding domain and the MSLN antigen-binding domain are linked directly or indirectly to a scaffold.

[0160] Mesothelin (MSLN), also known as CAK antigen or Pre-pro-megakaryocyte-potentiating factor, is expressed in normal lung mesothelial cells and at low levels in other normal organs. Mesothelin is expressed at high levels in ovarian and lung cancers. The polypeptide sequence of mesothelin is described in UniProt Accession Number Q13421 and included herein as SEQ ID NO:84.

[0161] MSLN antigen-binding domains may be derived from anti-MSLN antibodies known in the art, including but not limited to: anetumab (Bayer, described in WO2009/068204), 6A4/BMS-986148 (BMS, described in WO2009/045957), or the Mab Designs anti-MSLN antibody described in WO2018/060480.

[0162] In one embodiment, the 4-1BB×TAA antibody construct comprises a MSLN antigen-binding domain that competes for binding with anetumab for binding to MSLN. In another embodiment, the 4-1BB×TAA antibody construct comprises a MSLN antigen-binding domain that competes for binding with 6A4/BMS-986148 for binding to MSLN. In yet another embodiment, the 4-1BB×TAA antibody construct comprises a MSLN antigen-binding domain that competes for binding with the Mab Designs anti-MSLN antibody for binding to MSLN.

[0163] In some embodiments, the 4-1BB×TAA antibody construct comprises a MSLN antigen-binding domain that binds to the same epitope as anetumab for binding to MSLN. In another embodiment, the 4-1BB×TAA antibody construct comprises a MSLN antigen-binding domain that binds to the same epitope as 6A4/BMS-986148 for binding to MSLN. In yet another embodiment, the 4-1BB×TAA antibody construct comprises a MSLN antigen-binding domain that binds to the same epitope as the Mab Designs anti-MSLN antibody for binding to MSLN.

[0164] In one embodiment, the 4-1BB×TAA antibody construct comprises a MSLN antigen-binding domain that comprises at least one, two, or all three heavy chain CDRs and/or at least one, two, or all three light chain CDRs of any one of the anti-MSLN antibodies described in WO2009/068204, WO2009/045957, or WO2018/060480. In an alternate embodiment, the 4-1BB×TAA antibody construct comprises a MSLN antigen-binding, domain that comprises at least one, two, or all three heavy chain CDRs and at least one, two, or all three light chain CDRs of any one of the anti-MSLN antibodies described in WO2009/068204, WO2009/045957, or WO2018/060480. In other embodiments, the 4-1BB×TAA construct comprises a MSLN antigen-binding domain comprising a VH sequence that is at least about 80%, 85%, 90%, 95%, 96%, 97%, 98%, 99%, or 100% identical to the VH sequence of any one of the anti-MSLN antibodies described in WO2009/068204, WO2009/045957, or WO2018/060480. The specific sequences of the CDRs of exemplary anti-MSLN antibodies are described in Table the VH and VL sequences of these antibodies are found in Table 17. Other anti-MSLN antibody sequences can readily be determined by one of skill in the art with reference to the disclosures of WO2009/068204, WO2009/045957, or WO2018/060480.

TABLE F
CDR sequences of an exemplary anti-MSLN antibody
RG7787

| | Defi- | | | |
|---|---|---|---|---|
| | nition | CDR1 | CDR2 | CDR3 |
| Heavy | Kabat | GYTMN | LITPYNGASS | GGYDGRGFDY |
| Chain | | (SEQ ID | NYQKFRG | (SEQ ID NO: |
| | | NO: 454) | (SEQ ID NO: | 456) |
| | | | 455) | |
| | Chothia | GYSFTGY | TPYNGA | GGYDGRGFDY |
| | | (SEQ ID | (SEQ ID NO: | (SEQ ID NO: |
| | | NO: 457) | 458) | 456) |
| | IMGT | GYSFTGYT | ITPYNGAS | ARGGYDGRGFDY |
| | | (SEQ ID | (SEQ ID NO: | (SEQ ID NO: |
| | | NO: 459) | 460) | 461) |
| | AbM | GYSFTGYTMN | LITPYNGASS | GGYDGRGFDY |
| | | (SEQ ID | (SEQ ID NO: | (SEQ ID NO: |
| | | NO: 462) | 463) | 456) |
| Light | Kabat | SASSSVSYMH | DTSKLAS | QQWSKHPLT |
| Chain | | (SEQ ID | (SEQ ID NO: | (SEQ ID NO: |
| | | NO: 464) | 465) | 466) |
| | Chothia | SASSSVSYMH | DTSKLAS | QQWSKHPLT |
| | | (SEQ ID | (SEQ ID NO: | (SEQ ID NO: |
| | | NO: 464) | 465) | 466) |
| | IMGT | SSVSY | DTS | QQWSKHPLT |
| | | (SEQ ID | (SEQ ID NO: | |
| | | NO: 467) | 466) | |
| | AbM | SASSSVSYMH | DTSKLAS | QQWSKHPLT |
| | | (SEQ ID | (SEQ ID NO: | (SEQ ID NO: |
| | | NO: 464) | 465) | 466) |

### Scaffolds

[0165] As described herein, the 4-1BB×TAA antibody construct comprises a 4-1BB binding domain that binds to a 4-1BB ECD and a TAA antigen-binding domain, wherein the first 4-MB binding domain and the TAA antigen-binding domain are linked directly or indirectly to a scaffold. Direct linkage of the 4-1BB-binding domain and the TAA antigen-binding domain results when each of these domains is directly linked to the scaffold, without linkers. Thus, in one embodiment, the 4-1BB-binding domain is linked to the scaffold without a linker and the TAA antigen-binding domain is also linked to the scaffold without a linker. Methods of accomplishing direct linkage are known in the art and include recombinant DNA methodology and/or chemical conjugation, for example.

[0166] Indirect linkage can be achieved by using a linker to link one or both of the 4-1BB-binding domain and the TAA antigen-binding domain to the scaffold. Accordingly, in one embodiment, the 4-1BB-binding domain is linked to the scaffold with a linker and the TAA antigen-binding domain is also linked to the scaffold with a linker. In other embodiments, one of the 4-1BB-binding domain and the TAA antigen-binding domain is linked to the scaffold with a linker and the other is directly linked to the scaffold without a linker. In still other embodiments, the 4-1BB-binding domain is linked to the scaffold with a linker, and the TAA antigen-binding domain is linked to the 4-1BB-binding domain with a linker. In the latter embodiment, the TAA antigen-binding domain is considered to be indirectly linked to the scaffold. In an alternate embodiment, the TAA antigen-binding domain is linked to the scaffold with a linker, and the 4-1BB-binding domain is linked to the TAA antigen-binding domain with a linker. In the latter embodiment, the 4-1BB-binding domain is considered to be indirectly linked to the scaffold.

### Linkers and Linker Polypeptides

[0167] As indicated above, in some embodiments, indirect linkage of the 4-1BB-binding domains and the TAA antigen-binding domain to the scaffold is accomplished by the use of linkers. The linker may be a linker peptide, a linker polypeptide, or a non-polypeptide linker. In some embodiments, the antibody constructs described herein include a 4-1BB-binding domain and a TAA antigen-binding domain that are each operatively linked to a linker polypeptide wherein the linker polypeptides are capable of forming a complex or interface with each other. In some embodiments, the linker polypeptides are capable of forming a covalent linkage with each other. The spatial conformation of the constructs with the linker polypeptides is similar to the relative spatial conformation of the paratopes of a F(ab′)2 fragment generated by papain digestion, albeit in the context of an antibody construct with two antigen-binding domains.

[0168] In one embodiment, the linker polypeptides are selected from IgG1, IgG2, IgG3, or IgG4 hinge regions.

[0169] In some embodiments, the linker polypeptides are selected such that they maintain the relative spatial conformation of the paratopes of a F(ab′) fragment and are capable of forming a covalent bond equivalent to the disulphide bond in the core hinge of IgG. Suitable linker polypeptides include IgG hinge regions such as, for example those from IgG1IgG2, or IgG4. Modified versions of these exemplary linkers can also be used. For example, modifications to improve the stability of the IgG4 hinge are known in the art (see for example, Labrijn et al. (2009) Nature Biotechnology 27, 767-771),

[0170] A number of suitable scaffolds are known in the art, including peptides, polypeptides, polymers, nanoparticles or other chemical entities. In one embodiment, the scaffold is an Fc construct, A number of scaffolds based on alternate protein or molecular domains are known in the art and can be used to form selective pairs of two different target-binding polypeptides. Examples of such alternate domains include the cohesin-dockerin scaffolds described International Patent Publication No. WO2008/097817, and the split albumin scaffolds described in WO 2012/116453 and WO 2014/012082. A further example is the leucine zipper domains such as Fos and Jun that selectively pair together [S A Kostelny et al. J Immunol 1992 148:1547-53; Bernd J. Wranik, et al. J. Biol. Chem. 2012 287: 43331-43339]. Alternately, other selectively pairing molecular pairs such as the barnase barstar pair [Deyev, et al. (2003). Nat Biotechnol 21, 1486-1492], or split fluorescent protein pairs [WO 2011135040] can also be employed.

[0171] In other embodiments, the linker polypeptides are operatively linked to scaffolds other than an Fc, A number of scaffolds based on alternate protein or molecular domains are known in the art and can be used to form selective pairs of two different target-binding polypeptides. Examples of such alternate domains are the split albumin scaffolds described in WO 2012/116453 and WO 2014/012082. A further example is the leucine zipper domains such as Fos and Jun that selectively pair together [S A Kostelny, M S Cole, and J Y Tso. Formation of a bispecific antibody by the use of leucine zippers. J Immunol 1992 148:1547-53; Bernd. J. Wranik, Erin L. Christensen, Gabriele Schaefer, Janet K. Jackman, Andrew C. Wendel, and Eaton. LUZ-Y, a Novel Platform for the Mammalian Cell Production of Full-length IgG-bispecific Antibodies J. Biol. Chem. 2012 287: 43331-43339], Alternately, other selectively pairing molecular pairs such as the barnase barstar pair [Deyev, S. M., Waibel, R., Lebedenko, E. N., Schubiger, A. P., and Plïckthunk. (2003). Design of multivalent complexes using the barnase*barstar module, Nat Biotechnol 21, 1486-1492], DNA strand pairs [Zahida N. Chaudri, Michael Bartlet-Jones, George Panayotou, Thomas Klonisch, Ivan M. Roitt, Torben Lund, Peter J. Delves, Dual specificity antibodies using a double-stranded oligonucleotide bridge, FES Letters, Volume 450, Issues 1-2, 30 Apr. 1999, Pages 23-26], split fluorescent protein pairs [Ulrich Brinkmann, Alexander Haas. Fluorescent antibody fusion protein, its production and use, WO 2011135040 A1] can also be employed.

[0172] In embodiments where the scaffold is a peptide or polypeptide, the 4-1BB-binding domain and/or the TAA antigen-binding domain of the antibody construct may be linked directly or indirectly to the scaffold by genetic fusion. In other embodiments, where the scaffold is a polymer or nanoparticle, the 4-1BB-binding domain and/or the TAA antigen-binding domain of the antibody construct may be linked to the scaffold by chemical conjugation.

[0173] In one embodiment, the antibody construct described herein comprises a 4-1BB-binding domain, and a tumor-associated antigen (TAA)-antigen binding domain, wherein the first 4-1BB-binding domain and the TAA antigen binding domain are linked directly or indirectly to an Fc construct.

[0174] The term “Fc” or “Fc construct” as used herein refers to a C-terminal region of an immunoglobulin heavy chain that contains at least a portion of the constant region (also referred to as an “Fc domain” or “Fc region”), including the CH3 domain. The term includes native sequence Fc regions and variant Fc regions, Unless otherwise specified herein, numbering of amino acid residues in the Fc region or constant region is according to the EU numbering system, also called the EU index, as described in Edelman, G. M. of al., Proc. Natl. Acad. USA, 63, 78-85 (1969).

[0175] A “dimeric Fc construct” comprises two Fc polypeptides. An “Fc polypeptide” of a dimeric Fc construct refers to one of the two polypeptides forming the construct, i.e. a polypeptide comprising C-terminal constant regions of an immunoglobulin heavy chain that is capable of stable self-association. The Fc polypeptides are derived from heavy chain isotypes including IgG, IgA, IgM, 1gD, and IgE. The Fc polypeptides may also he derived from the heavy chain subtypes IgG1, IgG2, IgG3, IgG4, IgA 1, or IgA2. In some embodiments, the Fc construct is a human Fc construct. In some embodiments, the Fc construct is a human IgG Fc construct. In other embodiments, the Fc construct is a human IgG1 Fc construct.

[0176] Each Fc polypeptide comprises a CH3 sequence and may optionally comprise a CH2 sequence. In some embodiments, each Fc polypeptide comprises a CH3 sequences having one or more amino acid modifications. In some embodiments, each Fc polypeptide comprises a CH2 sequence comprises one or more amino acid modifications. In some embodiments, an Fc construct is composed of a single polypeptide, for example where the Fc polypeptides are linked by a linker. In other embodiments, the Fc construct is a heterodimeric Fc construct, wherein the Fc polypeptides that make up the Fc construct have different CH3 or CH2 sequences.

### CH3 Sequence Modifications

[0177] In certain embodiments, the scaffold is a heterodimeric Fc construct comprising CH3 sequence modifications that promote the formation of a heterodimeric Fc construct compared to a homodimeric Fc, as described in International Patent Application No. PCT/CA2011/001238 or International Patent Application No. PCT/CA2012/050780, the entire disclosure of each of which is hereby incorporated by reference in its entirety for all purposes.

[0178] Table G provides the amino acid sequence of the human IgG1 Fc sequence, corresponding to amino acids 231 to 447 of the full-length human IgG1 heavy chain. The CH3 sequence comprises amino acid 341-447 of the full-length human IgG1 heavy chain.

[0179] Typically, an Fc includes two contiguous heavy chain sequences or Fc polypeptide sequences (A and B) that are capable of dimerizing. In some embodiments, one or both sequences of these sequences may include one or more mutations or modifications at the following locations: L351, F405, Y407, T366, K392, T394, T350, S400, and/or N390, using EU numbering. In some embodiments, an Fc may include a mutant sequence as shown in Table G. In some embodiments, an Fc may include the mutations of Variant 1 A-B. In some embodiments, an Fc may include the mutations of Variant 2 A-B. In some embodiments, an Fc may include the mutations of Variant 3 A-B. In some embodiments, an Fc may include the mutations of Variant 4 A-B. In some embodiments, an Fc may include the mutations of Variant 5 A-B.

TABLE G
IgG1 Fc sequences

| Human IgG1 Fc | APELLGGPSVFLFPPKPKDTLMISRTPEVTCVVVDVS | |
|---|---|---|
| sequence 231- | HEDPEVKFNWYVDGVEVHNAKTKPREEQYNSTYRVVS | |
| 447 (EU- | VLTVLHQDWLNGKEYKCKVSNKALPAPIEKTISKAKG | |
| numbering) | QPREPQVYTLPPSRDELTKNQVSLTCLVKGFYPSDIA | |
| | VEWESNGQPENNVKTTPPVLDSDGSFFLYSKLTVDKS | |
| | RWQQGNVFSCSVMHEALHNHYTQKSLSLSPGK | |
| | (SEQ ID NO: 85) | |
| Variant IgG1 | | |
| Fc sequence | | |
| (231-447) | Chain | Mutations |
| 1 | A | L351Y_F405A_Y407V |
| | B | T366L_K392M_T394W |
| 2 | A | L351Y_F405A_Y407V |
| | B | T366L_K392L_T394W |
| 3 | A | T350V_L351Y_F405A_Y407V |
| | B | T350V_T366L_K392L_T394W |
| 4 | A | T350V_L351Y_F405A_Y407V |
| | B | T350V_T366L_K392M_T394W |
| 5 | A | T350V_L351Y_S400E_F405A_Y407V |
| | B | T350V_T366L_N390R_K392M_T394W |

[0180] Additional methods for modifying the Fc polypeptides of the Fc construct to promote heterodimeric Fc formation are known in the art and include, for example, those described in International Patent Publication No. WO 96/027011 (knobs into holes), in Gunasekaran et al. (Gunasekaran K. et al. (2010) J Biol Chem. 285, 19637-46, electrostatic design to achieve selective heterodimerization), in Davis et al. (Davis, J H et al, (2010) Prot Eng Des Sel :23(4): 195-202, strand exchange engineered domain (SEED) technology), and in Labrijn et al [Efficient generation of stable bispecific IgG1 by controlled Fab-arm exchange. Labrijn A F, Meesters J I, de Goeij B E, van den Bremer Neijssen J, van Kampen M D, Strumane K, Verploegen S, Kundu A, Gramer M J, van Berkel P H, van de Winkel J G, Schuurman J, Parren P W. Proc Natl Acad Sci U S A. 2013 Mar. 26; 1.10(13):5145-50.

### CH2 Sequence Modifications

[0181] In some embodiments, the scaffold is an construct wherein each Fc polypeptide of the Fc construct comprises a CH2 sequence and a CH3 sequence. One example of a CH2 sequence of an Fc is amino acids 231-340 of the sequence shown in Table B. Several effector functions are mediated by Fc receptors (FcRs), which bind to the Fc of an antibody.

[0182] The terms “Fc receptor” and “FcR” are used to describe a receptor that binds to the Fc region of an antibody. For example, an FcR can be a native sequence human FcR. Generally, an FcR is one which binds an IgG antibody (a gamma receptor) and includes receptors of the FcγRI, FcγRII, and FcγRIII subclasses, including allelic variants and alternatively spliced forms of these receptors. FcγRII receptors include FcγRIIA (an “activating receptor” and FcγRIIB (an “inhibiting receptor”), which have similar amino acid sequences that differ primarily in the cytoplasmic domains thereof. Immunoglobulins of other isotypes can also be bound by certain FcRs (see, e.g., Janeway et al., Immuno Biology: the immune system in health and disease, (Elsevier Science Ltd., NY) (4th ed., 1999)). Activating receptor FcγRIIA contains an immunoreceptor tyrosine-based activation motif (ITAM) in its cytoplasmic domain. Inhibiting receptor FcγRIIB contains an immunoreceptor tyrosine-based inhibition motif (ITIM) in its cytoplasmic domain (reviewed in Daëron, Annu. Rev. Immunol. 15:203-234 (1997)). FcRs are reviewed in Ravetch and Kinet, Annu. Rev. Immunol 9:457-92 (1991); Capel et al., Immunomethods 4:25-34 (1994); and de Haas et al., J. Lab, Clin. Med. 126:330-41 (1995). Other FcRs, including those to be identified in the future, are encompassed by the term “FcR” herein. The term also includes the neonatal receptor, FcRn, which is responsible for the transfer of maternal IgGs to the fetus (Guyer et al., J. Immunol. 117:587 (1976); and Kim et al., J. Immunol. 24:249 (1994)).

[0183] Modifications in the CH2 sequence can affect the binding of FcRs to the Fc construct. A number of amino acid modifications in the Fc region are known in the art for selectively altering the affinity of the Fc for different Fcgamma receptors. In some aspects, the Fc comprises one or more modifications to promote selective binding of Fc-gamma receptors.

[0184] Exemplary mutations that alter the binding of FcRs to the Fc are listed below:
[0185] S298A/E333A/K334A, S298A/E333A/K334A/K326A (Lu. Y, Venues J M, Chiang N, et al. J Immunol Methods. 2011 Feb. 28; 365(1-2):132-41);
[0186] F243L/R292P/Y300L/V305I/P396L, F243L/R292P/Y300L/L235V/P396L (Stavenhagen J B, Gorlatov S, Tuaillon N, et al. Cancer Res. 2007 Sep. 15; 67(18):8882-90; Nordstrom J L, Gorlatov S, Zhang W, et al. Breast Cancer Res. 2011 Nov. 30; 13(6):R123);
[0187] F243L (Stewart R, Thom G, Levens M, et al. Protein Eng Des Sel. 2011 September; 24(9):671-8.)
[0188] S298A/E333A/K334A (Shields R L, Namenuk A K, Hong K, et al. J Biol Chem. 2001 Mar. 2; 276(9):6591-604);
[0189] S239D/I1332E/A330L, S239D/I332E (Lazar G A, Dang W, Karki S, et al. Proc Natl Acad Sci USA. 2006 Mar. 14; 103(11):4005-10);
[0190] S239D/S267E, S267E/L328F (Chu S Y, Vostiar I, Karki S. et al. Mol Immunol. 2008 September; 45(15):3926-33);
[0191] S239D/D265S/S298A/I332E, S239E/S298A/K326A/A327H, G237F/S298A1A330L/I 332, S239D/I332E/S298A, S239D/K326E/A330L/I332E/S298A, G236A/S239D/D27 0LI332E, S239E/S267E/H268D, L234F/S267E/N325L, G237F/V266L/S267D and other mutations listed in WO2011/120134 and WO2011/120135, herein incorporated by reference.

[0192] Therapeutic Antibody Engineering (by William R. Strohl and Lila M. Strohl, Woodhead Publishing series in Biomedicine No 11, ISBN 1 907568 37 9, October 2012) lists mutations on page 283.

[0193] In some embodiments, the heterodimeric Fc comprises Fc polypeptides having CH2 sequences comprising one or more asymmetric amino acid modifications. Exemplary asymmetric amino acid modifications are described in international Patent Application No. PCT/CA2014/050507. In one embodiment the heterodimeric Fc comprises Fc polypeptides having the amino acid substitutions L234A, L235A, and D265S which reduce FcγR binding.

### Additional Modifications to Improve Effector Function

[0194] In some embodiments, the Fc construct includes amino acid modifications that improve its ability to mediate effector function. Such modifications are known in the art and include afucosylation, or engineering of the affinity of the towards an activating receptor, mainly FCγRIIIa for ADCC, and towards Clq for CDC.

[0195] Methods of producing antibody Fc regions with little or no fucose on the Fc glycosylation site (Asn 297 EU numbering) without altering the amino acid sequence are well known in the art. The GlymaX® technology (ProBioGen AG) is based on the introduction of a gene for an enzyme which deflects the cellular pathway of fucose biosynthesis into cells used for antibody Fc region production. This prevents the addition of the sugar “fucose” to the N-linked antibody carbohydrate part by cells. (von Horsten et al. (2.010) Glycobiology. 20 (12):1607-18). Another approach to obtaining antibody constructs having Fc constructs with lowered levels of fucosylation can be found in U.S. Pat. No. 8,409,572, which teaches selecting cell lines for antibody production based on their ability to yield lower levels of fucosylation on antibodies. In some embodiments, the Fc of the antibody constructs or antibody constructs can be fully afucosylated (meaning they contain no detectable fucose) or they can be partially afucosylated, meaning that the TAA presentation inducer in bispecific antibody format contains less than 95%, less than 85%, less than 75%, less than 65%, less than 55%, less than 45%, less than 35%, less than 25%, less than 15% or less than 5% of the amount of fucose normally detected for a similar antibody produced by a mammalian expression system.

[0196] Thus, in some embodiments, the antibody constructs described herein can include a dimeric Fc that comprises one or more amino acid modifications as noted in Table H that confer improved effector function. In some embodiments, the construct can be afucosylated to improve effector function.

TABLE H
CH2 domains and effector function engineering

| Reference | Mutations | Effect |
|---|---|---|
| Lu, 2011, | Afucosylated | Increased ADCC |
| Ferrara 2011, | | |
| Mizushima 2011 | | |
| Lu, 2011 | S298A/E333A/K334A | Increased ADCC |
| Lu, 2011 | S298A/E333A/K334A/K326A | Increased ADCC |
| Stavenhagen, 2007 | F243L/R292P/Y300L/V305I/ | Increased ADCC |
| | P396L | |
| Nordstrom, 2011 | F243L/R292P/Y300L/L235V/ | Increased ADCC |
| | P396L | |
| Stewart, 2011 | F243L | Increased ADCC |
| Shields, 2001 | S298A/E333A/K334A | Increased ADCC |
| Lazar, 2006 | S239D/I332E/A330L | Increased ADCC |
| Lazar, 2006 | S239D/I332E | Increased ADCC |
| Bowles, 2006 | AME-D, not specified mutations | Increased ADCC |
| Heider, 2011 | 37.1, mutations not disclosed | Increased ADCC |
| Moore, 2010 | S267E/H268F/S324T | Increased CDC |

[0197] Fc modifications reducing FcγR and/or complement binding and/or effector function are known in the art. Various publications describe strategies that have been used to engineer antibodies with reduced or silenced effector activity (see Strobl, W R (2009), Curr Opin Biotech 20:685-691, and Strohl, W R and Strohl L M, “Antibody Fc engineering for optimal antibody performance” In Therapeutic Antibody Engineering, Cambridge: Woodhead Publishing (2012), pp 225-249). These strategies include reduction of effector function through modification of glycosylation, use of IgG2/IgG4 scaffolds, or the introduction of mutations in the hinge or CH2 regions of the Fc. For example, U.S. Patent Publication No. 2011/0212087 (Strohl), International Patent Publication No. WO 2006/105338 (Xencor), U.S. Patent Publication No. 2012/0225058 (Xencor), U.S. Patent Publication No. 2012/0251531 (Genentech), and Strop et al ((2012) J. Mol. Biol. 420: 204-219) describe specific modifications to reduce FcγR or complement binding to the Fc.

[0198] Specific, non-limiting examples of known amino acid modifications to reduce FcγR or complement binding to the Fc include those identified in Table I.

TABLE I
Modifications to reduce FcγR or complement binding to the Fc

| Company | Mutations |
|---|---|
| GSK | N297A |
| Ortho Biotech | L234A/L235A |
| Protein Design labs | IGG2 V234A/G237A |
| Wellcome Labs | IGG4 L235A/G237A/E318A |
| GSK | IGG4 S228P/L236E |
| Alexion | IGG2/IGG4combo |
| Merck | IGG2 H268Q/V309L/A330S/A331S |
| Bristol-Myers | C220S/C226S/C229S/P238S |
| Seattle Genetics | C226S/C229S/E3233P/L235V/L235A |
| Amgen | E. coli production, non glyco |
| Medimune | L234F/L235E/P331S |
| Trubion | Hinge mutant, possibly C226S/P230S |

[0199] In some embodiments, the Fc comprises at least one amino acid modification identified in Table I. In some embodiments, the Fc comprises amino acid modification of at least one of L234, L235, or D265. In some embodiments, the Fc comprises amino acid modification at L234, L235 and D265. in some embodiments, the Fc comprises the amino acid modification L234A, L235A and D265S.

[0200] In embodiments where the scaffold is an Fc, the 4-1BB-binding domain may be linked to the N-terminus of one of the Fc polypeptides. In other embodiments, the 4-1BB-binding domain may be linked to the C-terminus of one of the Fc polypeptides. In certain embodiments, the 4-1BB×TAA antibody construct can comprise a 4-1BB-binding domain linked to the N-terminus of one of the Fc polypeptides and another 4-1BB-binding domain linked to the N-terminus of the other Fc polypeptide. In yet other embodiments, the 4-1BB×TAA antibody construct can comprise a 4-MB-binding domain that is linked to the C-terminus of one of the Fc polypeptides. In certain embodiments, the 4-1BB×TAA antibody construct can comprise a 4-1BB-binding domain linked to the C-terminus of one of the Fc polypeptides and another 4-1RB-binding domain linked to the C-terminus of the other Fc polypeptide.

[0201] In additional embodiments where the scaffold is an Fc, the TAA antigen-binding domain may be linked to the N-terminus of one of the Fc polypeptides. In other embodiments, the TAA antigen-binding domain may be linked to the C-terminus of one of the Fc polypeptides. In certain embodiments, the 4-1BB×TAA antibody construct can comprise a TAA antigen-binding domain linked to the N-terminus of one of the Fc polypeptides and another TAA antigen-binding domain linked to the N-terminus of the other Fc polypeptide. In yet other embodiments, the 4-1BB×TAA can comprise a TAA antigen-binding domain that is linked to the C-terminus of one of the Fc polypeptides. In certain embodiments, the 4-1BB×TAA antibody construct can comprise a TAA antigen-binding domain linked to the C-terminus of one of the Fc polypeptides and another TAA antigen-binding domain linked to the C-terminus of the other Fc polypeptide.

[0202] As would be understood by one of skill in the art, in some embodiments combinations of the above linkages are also possible. Specific exemplary combinations are described as follows.

### Formats of Antibody Constructs

### 4-1.BB×TAA Antibody Constructs

[0203] The 4-1BB×TAA antibody constructs described herein comprise a 4-1BB-binding domain and a TAA antigen-binding domain wherein the 4-1BB-binding domain and the TAA antigen-binding domain are linked directly or indirectly to a scaffold. As is known in the art, these 4-1BB×TAA antibody constructs may be constructed in many formats; exemplary, non-limiting formats are described below.

[0204] In embodiments where the 4-1BB-binding domain of the 4-1BB×TAA antibody construct is a 4-1BB antigen-binding domain, the 4-1BB antigen-binding domain may be in Fab format, scFv format, or sdAb format. In one embodiment, the antibody construct comprises a 4-1BB antigen-binding domain that is in the Fab format, and a TAA antigen-binding domain, wherein the 4-1BB antigen-binding domain and the TAA antigen-binding domain are linked directly or indirectly to a scaffold. In another embodiment, the antibody construct comprises a 4-1BB antigen-binding domain that is in the scFv format, and a TAA antigen-binding domain, wherein the 4-1BB antigen-binding domain and the TAA antigen-binding domain are linked directly or indirectly to a scaffold. In one embodiment, the antibody construct comprises a 4-1BB antigen-binding domain that is in the sdAb format, and a TAA antigen-binding domain, wherein the 4-1BB antigen-binding domain and the TAA antigen-binding domain are linked directly or indirectly to a scaffold. In some of these embodiments, the 4-1BB antigen-binding domain is linked to the N-terminus of the scaffold and the TAA antigen-binding domain is linked to the C-terminus of the scaffold. In other embodiments, both the 4-1BB antigen-binding domain and the TAA antigen-binding domain are linked to the N-terminus of the scaffold.

[0205] In some embodiments, the scaffold is an Fc construct. In one such embodiment, the 4-1BB×TAA antibody construct comprises a first 4-1BB antigen-binding domain linked to the N-terminus of a first Fc polypeptide, a second 4-1BB antigen-binding domain linked to the N-terminus of a second Fc polypeptide, and a TAA antigen-binding domain linked to the C-terminus of the first Fc polypeptide. In some embodiments, the first and second 4-1BB antigen-binding domains are both in the Fab format and the TAA antigen-binding domain is in the scFv format. FIG. 2B provides a representation of an exemplary construct related to these embodiments.

[0206] In other embodiments where the scaffold is an Fc construct, the 4-1BB×TAA antibody construct comprises a first 4-1BB antigen-binding domain linked to the N-terminus of a first Fc polypeptide, a second 4-i BB antigen-binding domain linked to the N-terminus of a second Fc polypeptide, a first TAA antigen-binding domain linked to the C-terminus of the first Fc polypeptide, and a second TAA linked to the C-terminus of the second Fc polypeptide. In some embodiments, the first and second 4-1BB antigen-binding domains are both in the Fab format and the first and second TAA antigen-binding domain are both in the scFv format. FIG. 2C provides a representation of an exemplary construct related to these embodiments.

[0207] In other embodiments where the scaffold is an Fc construct, the 4-1BB×TAA antibody construct comprises a 4-1BB antigen-binding domain linked to the N-terminus of one of the Fc polypeptides of the Fc construct, and a first TAA antigen-binding domain linked to the C-terminus of the same Fc polypeptide. In some embodiments, the 4-1BB antigen-binding domain is in the Fab format and the TAA antigen-binding domain is in the scFv format. FIG. 2D provides a representation of an exemplary construct related to these embodiments.

[0208] In still other embodiments where the scaffold is an Fc construct, the 4-1BB×TAA antibody construct comprises a first 4-1BB antigen-binding domain linked to the N-terminus of a first Fc polypeptide, a second 4-1BB antigen-binding domain linked to the N-terminus of a second Fc polypeptide, and a TAA antigen-binding domain linked to the N-terminus of the VH domain of the first 4-1BB antigen-binding domain. In some embodiments, the first and second 4-1BB antigen-binding domains are both in the Fab format and the TAA antigen-binding domain is in the scFv format. FIG. 2E provides a representation of an exemplary construct related to these embodiments.

[0209] In other embodiments where the scaffold is an Fc construct, the 4-1BB×TAA antibody construct comprises a 4-1BB antigen-binding domain linked to the N-terminus of a first Fc polypeptide, and a TAA antigen-binding domain linked to the N-terminus of the second Fc polypeptide. In some embodiments, the 4-1BB antigen-binding domains are both in the Fab format and the TAA antigen-binding domain is in the scFv format. FIG. 2F provides a representation of an exemplary construct related to these embodiments.

[0210] In other embodiments where the scaffold is an Fc construct, the 4-1BB×TAA antibody construct comprises a 4-1BB antigen-binding domain linked to the N-terminus of one of the Fc polypeptides of the Fc construct and a TAA antigen-binding domain linked to the N-terminus of the VH region of the 4-1BB antigen-binding domain. In some embodiments, the 4-1BB antigen-binding domain is in the Fab format and the TAA antigen-binding domain is in the say format. FIG. 2G provides a representation of an exemplary construct related to these embodiments.

[0211] In further embodiments where the scaffold is an Fc construct, the 4-1BB×TAA antibody construct comprises a 4-1BB antigen-binding domain linked to the N-terminus of one of the Fc polypeptides of the Fc construct, a TAA antigen-binding domain linked to the C-terminus of the same Fc polypeptide, and a TAA antigen-binding domain linked to the C-terminus of the second Fc polypeptide. In some embodiments, the 4-1BB antigen-binding domain is in the Fab format and the TAA antigen-binding domains are in the scFv format. FIG. 2G provides a representation of an exemplary construct related to these embodiments.

[0212] In yet other embodiments where the scaffold is an Fc construct, the 4-1BB×TAA antibody construct comprises a 4-1BB antigen-binding domain linked to the N-terminus of one of the Fc polypeptides of the Fc construct, and a TAA antigen-binding domain linked to the C-terminus of the second Fc polypeptide. In some embodiments, the 4-1BB antigen-binding domain is in the Fab format and the TAA antigen-binding domain is in the scFv format.

[0213] In one embodiment, the 4-1BB×TAA antibody construct comprises a 4-1BB-binding domain that is a 4-1BB ligand, the 4-1BB ligand linked to the C-terminus of one of the Fc polypeptides of an Fc construct, and a TAA antigen-binding domain that is in a Fab format, linked to the N-terminus of the other Fc polypeptide of the Fc construct.

### Functional Activity of the 4-1BB×TAA Antibody Constructs

[0214] The 4-1BB×TAA antibody constructs provided herein can bind 4-1BB and a TAA with a range of affinities. The affinity or avidity of an antibody for an antigen can be determined experimentally using methods known in the art (see, for example, Berzofsky, et al., “Antibody-Antigen Interactions,” In Fundamental Immunology, Paul. W. Ed., Raven Press: New York, N.Y. (1984); Kuby, Janis Immunology, W.H. Freeman and Company: New York, N.Y. (1992); and methods described herein).

[0215] The measured affinity of a particular antibody-antigen interaction can vary if measured under different conditions (e.g., salt concentration, pH). Thus, measurements of affinity and other antigen-binding parameters are preferably made with standardized solutions of antibody and antigen, and a standardized buffer, such as the buffer described herein. The affinity, K_{D} is a ratio of kₒₙ/k_{off}. Generally, a K_{D} in the micromolar range is considered low affinity for monospecific bivalent antibodies. Generally, a K_{D} in the picomolar range is considered high affinity for monospecific bivalent antibodies. As is known in the art, the affinity of an antibody measured as a monovalent binder, is generally lower than that measured as a bivalent binder.

[0216] In some embodiments, the 4-11.13B x TAA antibody construct comprises a 4-1BB antigen-binding domain that has an K_{D} for human 4-1BB between about 15 nM and 100 nM, about 15 nM and 200 nM, or about 15 nM and 500 nM, between about 100 pM and 1 μM, measured as a monovalent binder. In additional embodiments, the 4-1BB×TAA antibody construct comprises a 4-1BB antigen-binding domain that has an KD for human 4-1BB between about 1 nM and about 1000 nM, or between about 10 nM to about 500nM, or between about 20 nM and about 400 nM measured as a monovalent binder. In other embodiments, the 4-1BB×TAA antibody construct comprises a TAA antigen-binding domain having a K_{D} for the TAA of between about 0.1 nM to about 50 nM, or about 1 nM to about 20 nM, or about 1 nM to about 10 nM. The KD may be measured by a number of known methods, for example SPR, as described elsewhere herein. As used in this section, the term “about” means 10% of the value for K_{D} identified in each range.

[0217] In some embodiments, the 4-1BB×TAA antibody construct binds to one or more TAA-expressing cell lines as determined by for example, ELBA, BiaCore™, and/or flow cytometry, or as described in the Examples. In certain embodiments, the TAA-expressing cell line is an ovarian adenocarcinoma cell line, such as, for example, IGROV1, SKOV3, or OVCAR3. In certain embodiments, the TAA-expressing cell line is a lung carcinoma cell line. In certain embodiments, the lung carcinoma cell line is a lung squamous cell line such as H226; or a lung adenocarcinoma cell line such as H441, HCC827, H1573, H1975, orE11563; or a lung carcinoma cell line such as H1299, or a lung large cell carcinoma, such as H661. In some embodiments the TAA-expressing cell line is a HER2-expressing cell line such as SKBr3, a FRα-expressing cell line, a LIV-1-expressing cell line, an NaPi2b-expressing cell line, or a mesothelin-expressing cell line.

[0218] In some embodiments, the 4-1BB×TAA antibody construct may be able to stimulate 4-1BB activity in T cells as measured by cytokine production, in the presence of TAA expressing cells. In some embodiments, the TAA-expressing cell expresses the TAA on the cell surface at greater than about 500,000 molecules per cell, as measured by quantitative flow cytometry or other quantitative method. In some embodiments, the TAA-expressing cell expresses the TAA on the cell surface at greater than about 100,000 molecules per cell, as measured by quantitative flow cytometry or other quantitative method. In some embodiments, the TAA-expressing cell expresses the TAA on the cell surface at between about 100,000 and 500,000 molecules per cell, as measured by quantitative flow cytometry or other quantitative method. In some embodiments, the TAA-expressing cell expresses the TAA on the cell surface at between about 50,000 and 500,000 molecules per cell, as measured by quantitative flow cytometry or other quantitative method.

[0219] In some embodiments, the 4-1BB×TAA antibody construct binds to 4-1BB-expressing cells as determined by the methods described above. In some embodiments, the 4-1BB-expressing cells are primary T, NK or NKT cells, activated primary T, NK or NKT cells, regulatory T cells, or T, NKT or NKT cells extracted from tumours.

[0220] In some embodiments, the 4-1BB×TAA antibody constructs described herein may be capable of stimulating 4-1BB signalling in 4-1BB expressing cells. Methods of testing for 4-1BB activity are known in the art. For example, an NF-κB reporter gene assay as described in the examples may be used to assess the ability of the 4-1BB×TAA antibody constructs to promote NF-κB activation and translocation to the nucleus, subsequently driving reporter gene expression. As another example, a primary T cell coculture assay as described in the examples may be employed to assess the ability of the 1-1BB×TAA antibody constructs to stimulate T cell activation by measuring the increase or decrease in the production of a cytokine (such as IL-2, IL-4, IL-5, IL-6, IL-9, IL-10, IL-12, IL-13, IL-15, IL-21, IL-22, IL-35, IFNγ, TNF-α, TGF-β), increase or decrease in the expression of chemokine receptors (CXCR3, CXCRS, CXCR6, CCR1, CCR2, CCR4, CCRS, CCR7, CCR8, CCR9, CCR10), increase or decrease in expression of key transcription factors (Tbet, GATA3, FOXP3, EOMES, TOX), increase or decrease in metabolic activity or proteins regulating metabolic activity, increase or decrease in expression of anti- or pro-apoptotic proteins (Bcl2, Bcl-Xl, Bim, Mcl1), increase or decrease in expression of surface markers (PD1, TIGIT, LAG3, ICOS, CD45RA, CD45RO, CD44, :D69, CD44, KLRG1), increase or decrease in the ability of T cells to kill tumour cells, or the phosphorylation, localization or activity of signaling proteins (Akt/PkB, PI3K, CD3zeta, LAT, SLP76, IκK, NFκB, TRAF family MEK, MEKK, NIK, ERK, p38 MAPK, c-fos, c-jun, ATF, Foxo) or proteins regulating cell cycle (CyclinD3, p27kip1). This could be assessed either at the level of protein, mRNA or chromosomal availability. Activity in the primary T cell assay could also be assessed by examining increase or decrease in total cellular DNA contents (by measuring incorporation of ³H-thymidine, bromodeoxyuridine or analogous trackers) or by increase or decrease in levels of a tracking dye which is able to determine number of divisions in assays where the cells are labelled with the dye (CFDA-SE, Cell Tracker Violet, PKH26). These assays are well known to one of skill in the art, and in many cases, reagents and kits for carrying out these assays are commercially available, such as for example, CellTracker™Violet BMQC Dye (Thermofisher Scientific) or CellTrace™ Violet Cell proliferation Kit, Thermofisher Scientific/Invitrogen™.

### 4-1BB Antibody Constructs

[0221] The present disclosure further provides antibody constructs or antigen-binding fragments thereof that specifically bind to 4-1BB ECD (4-1BB antibody constructs). In some embodiments, these 4-1BB antibody constructs comprise VH and VL sequences as set forth in Tables 13 and 14, and the CDR sequences of these VH and VL sequences can be found in Table 18. In certain embodiments, the 4-1BB antibody construct is capable of agonizing 4-1BB activity as described elsewhere herein. In some embodiments the 4-1BB antibody construct binds to any one of CRD1, CRD2, CRD3, or CDR4 of human 4-1BB.

[0222] In one embodiment, a 4-1BB antibody construct or antigen-binding fragment thereof, comprises a heavy chain variable sequence comprising three heavy chain CDRs and a light chain variable sequence comprising three light chain CDRs, wherein the heavy chain CDRs and the light chain CDRs are from any one of antibodies IG1, 1B2, 1C3, 1C8, 2A7, 2E8, 2H9, 3D7, 3H1, 3E7, 3G4, 4B11 4E6, 4F9, G10, 5E2, 5G8, or 6B3 and the 4-1BB antibody construct binds to human 4-1BB. In some embodiments, the 4-1BB antibody construct or antigen-binding fragment comprises a heavy chain variable (VH) sequence comprising three CDRs and a light chain variable (VL) sequence comprising three CDRs, wherein the heavy chain CDRs and the light chain CDRs are from any one of antibodies 1G1, 1C3, 1C8, 2E8, 3E7, 4E6, 5G8, or 6B3, and the 4-1BB antibody construct binds to human 4-1BB.

[0223] In certain embodiments, the 4-1BB antibody construct comprises VH and VL sequences that are human or humanized. In other embodiments, the 4-1BB antibody construct comprises a VH sequence and a VL sequence having at least 85%, 90%, 95%, 96%, 97%, 98%, or 99% sequence identity to the VH and VL sequences of any one of variants v28726, v28727, v28728, v28730, v28700, v28704, v28705, v28706, v28711, v28712, v28713, v28696, v28697, v28698, v28701, v28702, v28703, v28707, v28683, v28684, v28685, v28686, v28687, v28688, v28689, v28690, v28691, v28692, v28694, or v28695.

[0224] The anti-4-1BB CDR, VH and VL sequences may be used to construct various formats of antibody constructs as is known in the art. For example, these sequences may be used to construct Fab fragments or says, which may be linked to a scaffold such as an Fc or other scaffolds as described herein. Exemplary formats for antibody constructs comprising these CDR, VH and VL sequences are depicted in FIG. 1. The antibody constructs may be monovalent, bivalent or multivalent. In some embodiments, the antibody constructs are monospecific. In some embodiments, the antibody constructs are monospecific and in the naturally occurring format (FSA).

[0225] The anti-4-1BB VH and VI, sequences as set forth in Tables 13, 14 and the anti-4-1BB CDR sequences found in Table 18 may further be used in the construction of bispecific or multispecific antibodies, such as the 4-1BB×TAA antibody constructs described here, or other antibody constructs comprising at least one antigen-binding domain that binds to the ECD of 4-1BB.

[0226] In some embodiments, the 4-1BB antibody constructs in monovalent form bind human 4-1BB with a K_{D} for 4-1BB between about 15 nM and 100 nM, about 15 nM and 200 nM, or about 15 nM and 500 nM, between about 100 pM and 1 μM. In additional embodiments, the 4-1BB antibody construct in monovalent form comprises a 4-1BB antigen-binding domain that has an K_{D} for human 4-1BB between about 1 M and about 1000 nM, or between about 10 nM to about 500 nM, or between about 20 nM and about 400 nM. As indicated above, the KD may be measured by a number of known methods, for example SPR, as described elsewhere herein. As used in this section, the term “about” means±10% of the value for K_{D} identified in each range. In a related embodiment, the term“about” means±20% of the value for K_{D} as measured by SPR.

[0227] The 4-1BB antibody constructs described herein may be prepared, tested and used as described elsewhere herein.

### FRα Antibody Constructs

[0228] The present disclosure further provides antibody constructs or antigen-binding fragments thereof that specifically bind to FRα (FRα antibody constructs). These FRα antibody constructs comprise VH and VL sequences as set forth in Tables 17 and 20, and the CDR sequences of these VH and VL sequences can be found in Table 18. In one embodiment, the FRα antibody constructs bind to human FRα.

[0229] In some embodiments, the FRα antibody constructs comprise a heavy chain variable sequence comprising three heavy chain CDRs and a light chain comprising three light chain CDRs, wherein the heavy chain CDRs and the light chain CDRs are from antibody 8K22 or antibody 1H06.

[0230] In certain embodiments, the FRα antibody constructs comprise VH and VL sequences that are human or humanized. In related embodiments, the FRα antibody construct comprises a VH sequence and a VL sequence having at least 85%, 90%, 95%, 96%, 97%, 98%, or 99% sequence identity to the VH and VL sequences of any one of variants 23794, 23795, 23796, 23797, 23798, 23799, 23800, 23801, 23802, 23803, 23804, 23805, 23806, 23807, 23808, 23809, 23810, 23811, 23812, 23813, 23814, 23815, 23816, 23817, or 23818, derived from the 8K22 antibody.

[0231] In other embodiments, the FRα antibody constructs comprise humanized VH and VL sequences comprising the heavy chain CDRs and the light chain CDRs of antibody 1H06.

[0232] In some embodiments, humanized FRα antibody constructs comprise a humanized FRα Fab domain that is more stable that than of the parental Fab from which the humanized Fab domain is derived. In related embodiments, the humanized FRα Fab domain can exhibit a Tm that is up to 10° C. higher than that of the parental Fab, In some embodiments, the humanized FRα Fab domain can exhibit a Tm that is up to 5° C. higher than that of the parental Fab.

[0233] In certain embodiments, the FRα antibody construct has a binding affinity or K_{D} for human FRα ranging from 100 pM to 100 nM. In some embodiments, the FRα antibody construct has a binding affinity or K_{D} for human FRα ranging from 10 pM to 100 nM. In related embodiments, the FRα antibody construct has a K_{D} for human FRα ranging from 1 nM to 50 nM. In additional related embodiments, the affinity of the FRα antibody constructs for human FRα is measured by Bio-layer interferometry (BLI).

[0234] These anti-FRα CDR, VH and VL sequences described in Tables 17, 18, and 20 may be used to construct various formats of antibody constructs as is known in the art. For example, these sequences may be used to construct Fab fragments or scFvs, which may be linked to a scaffold such as an Fc or other scaffold as described herein. Exemplary formats for antibody constructs comprising these CDR, VH and VL sequences are depicted in FIG. 1. The antibody constructs may be monovalent, bivalent or multivalent. In some embodiments, the antibody constructs are monospecific. In some embodiments, the antibody constructs are monospecific and in the naturally occurring format (FSA).

[0235] The anti-FRα VH and VL sequences as set forth in Tables 17, 20 and the anti-FRα CDR sequences found in Table 18 may further be used in the construction of hi specific or multispecific antibodies, such as the 4-1BB×FRα antibody constructs described here, or other antibody constructs comprising at least one antigen-binding domain that binds to the FRα.

[0236] The FRα antibody constructs described herein may be prepared, tested and used as described elsewhere herein.

[0237] Methods of Preparing the Antibody Constructs

[0238] The 4-1BB×TAA antibody constructs FRα antibody constructs and 4-1BB antibody constructs described herein may be produced using recombinant methods and compositions, e.g., as described in U.S. Pat. No. 4,816,567. This method and other methods for producing these constructs are described as follows.

[0239] Certain embodiments thus relate to one or more nucleic acids encoding an antibody construct described herein. Such nucleic acids may encode the amino acid sequences corresponding to the 4-1BB×TAA antibody constructs or the 4-1BB antibody constructs.

[0240] Certain embodiments relate to one or more vectors (e.g., expression vectors) comprising nucleic acid encoding the antibody constructs described herein. In some embodiments, the nucleic acid encoding the antibody construct is included in a multicistronic vector. In other embodiments, each polypeptide chain of the antibody construct is encoded by a separate vector. It is further contemplated that combinations of vectors may comprise nucleic acid encoding a single antibody construct.

[0241] Certain embodiments relate to host cells comprising such nucleic acid or one or more vectors comprising the nucleic acid. In some embodiments, for example, where the antibody construct is a multispecific or bispecific antibody, a host cell comprises e.g., has been transformed with): (1) a vector comprising a nucleic acid that encodes an amino acid sequence comprising the VL of the antigen-binding domain and an amino acid sequence comprising the VH of the antigen-binding domain, or (2) a first vector comprising a nucleic acid that encodes an amino acid sequence comprising the VL of the antigen-binding domain and a second vector comprising a nucleic acid that encodes an amino acid sequence comprising the VH of the antigen-binding domain. In some embodiments, the host cell is eukaryotic, e.g. a Chinese Hamster Ovary (CHO) cell, or human embryonic kidney (HEK) cell, or lymphoid cell (e.g., YO, NS0, Sp20 cell).

[0242] Certain embodiments relate to a method of making an antibody construct, wherein the method comprises culturing a host cell comprising nucleic acid encoding the antibody construct, as described above, under conditions suitable for expression of the antibody construct, and optionally recovering the antibody construct from the host cell (or host cell culture medium).

[0243] For recombinant production of the antibody construct, nucleic acid encoding an antibody construct, e.g., as described above, is isolated and inserted into one or more vectors for further cloning and/or expression in a host cell. Such nucleic acid may be readily isolated and sequenced using conventional procedures (e.g., by using oligonucleotide probes that are capable of binding specifically to genes encoding the heavy and light chains of the antibody construct).

[0244] The term “substantially purified” refers to a construct described herein, or variant thereof, that may be substantially or essentially free of components that normally accompany or interact with the protein as found in its naturally occurring environment, i.e. a native cell, or host cell in the case of recombinantly produced construct. In certain embodiments, a construct that is substantially free of cellular material includes preparations of protein having less than about 30%, less than about 25%, less than about 20%, less than about 15%, less than about 10%, less than about 5%, less than about 4%, less than about 3%, less than about 2%, or less than about 1% (by dry weight) of contaminating protein. When the construct is recombinantly produced by the host cells, the protein in certain embodiments is present at about 30%, about 25%, about 20%, about 15%, about 10%, about 5%, about 4%, about 3%, about 2%, or about 1% or less of the dry weight of the cells. When the construct is recombinantly produced by the host cells, the protein, in certain embodiments, is present in the culture medium at about 5 g/L, about 4 g/L, about 3 about 2 g/L, about 1 g/L, about 750 mg/L, about 500 mg/L, about 250 mg/L, about 100 mg/L, about 50 mg/L, about 10 mg/L, or about 1 mg/L or less of the dry weight of the cells.

[0245] In certain embodiments, the term “substantially purified” as applied to a construct comprising a heteromultimer Fc and produced by the methods described herein, has a purity level of at least about 30%, at least about 35%, at least about 40%, at least about 45%, at least about 50%, at least about 55%, at least about 60%, at least about 65%, at least about 70%, specifically, a purity level of at least about 75%, 80%, 85%, and more specifically, a purity level of at least about 90%, a purity level of at least about 95%, a purity level of at least about 99% or greater as determined by appropriate methods such as SDS/PAGE analysis, RP-HPLC, SEC, and capillary electrophoresis.

[0246] Suitable host cells for cloning or expression of antibody construct-encoding vectors include prokaryotic or eukaryotic cells described herein,

[0247] A “recombinant host cell” or “host cell” refers to a cell that includes an exogenous polynucleotide, regardless of the method used for insertion, for example, direct uptake, transduction, f-mating, or other methods known in the art to create recombinant host cells. The exogenous polynucleotide may be maintained as a nonintegrated vector, for example, a plasmid, or alternatively, may be integrated into the host genome.

[0248] As used herein, the term “eukaryote” refers to organisms belonging to the phylogenetic domain Eucarya such as animals (including but not limited to, mammals, insects, reptiles, birds, etc.), ciliates, plants (including but not limited to, monocots, dicots, algae, etc.), fungi, yeasts, flagellates, microsporidia, protists, and the like.

[0249] As used herein, the term “prokaiyote” refers to prokaryotic organisms. For example, a non-eukaryotic organism can belong to the Eubacteria (including but not limited to, Escherichia coil, Thermus thermophilus, Bacillus stearothermophilus, Pseudomonas fluorescens, Pseudomonas aeruginosa, Pseudomonas putida, and the like) phylogenetic domain, or the Archaea (including but not limited to, Methanococcus jannaschii, Methanobacterium thermoautotrophicum, Halobacterium such as Haloferax volcanii and Halobacterium species NRC-1, Archaeoglobus fulgidus, Pyrococcus furiosus, Pyrococcus horikoshii, Aeuropyrum pernix, and the like) phylogenetic domain,

[0250] For example, an antibody construct may be produced in bacteria, in particular when glycosylation and Fc effector function are not needed. For expression of antigen-binding construct fragments and polypeptides in bacteria, see, e.g., U.S. Pat. Nos. 5,648,237, 5,789,199, and 5,840,523. (See also Charlton Methods in Molecular Biology, Vol. 248 (B.K.C. Lo, ed., Humana Press, Totowa, N.J., 2003), pp. 245-254, describing expression of antibody fragments in E. coli.) After expression, the antigen-binding construct may be isolated from the bacterial cell paste in a soluble fraction and can be further purified.

[0251] In addition to prokaryotes, eukaryotic microbes such as filamentous fungi or yeast are suitable cloning or expression hosts for Antibody construct-encoding vectors, including fungi and yeast strains whose glycosylation pathways have been “humanized,” resulting in the production of an antigen-binding construct with a partially or fully human glycosylation pattern. See Gerngross, Nat. Biotech. 22:1409-4414 (2004), and Li et al., Nat. Biotech, 24:210-215 (2006).

[0252] Suitable host cells for the expression of glycosylated antigen-binding constructs are also derived from multicellular organisms (invertebrates and vertebrates). Examples of invertebrate cells include plant and insect cells. Numerous baculoviral strains have been identified which may be used in conjunction with insect cells, particularly for transfection of Spodoptera frugiperda cells.

[0253] Plant cell cultures can also be utilized as hosts. See, e.g., U.S. Pat. Nos. 5,959,177, 6,040,498, 6,420,548, 7,125,978, and 6,417,429 (describing PLANTIBODIES™ technology for producing antigen-binding constructs in transgenic plants).

[0254] Vertebrate cells may also be used as hosts. For example, mammalian cell lines that are adapted to grow in suspension may be useful. Other examples of useful mammalian host cell lines are monkey kidney CV1 line transformed by SV40 (COS-7); human embryonic kidney line (293 or 293 cells as described, e.g., in Graham et al., J. Gen Viral. 36:59 (1977)); baby hamster kidney cells (BHK); mouse sertoli cells (TM4 cells as described, e.g., in Mather, Biol. Reprod. 23:243-251 (1980)); monkey kidney cells (C V1); African green monkey kidney cells (VERO-76); human cervical carcinoma cells (HELA); canine kidney cells (MDCK; buffalo rat liver cells (BRL 3A); human lung cells (W138); human liver cells (Hep G2); mouse mammary tumor (MMT 060562); TRI cells, as described, e.g., in Mather et al., Annals N.Y. Acad. Sci. 383:44-68 (1982); MRC 5 cells; and FS4 cells. Other useful mammalian host cell lines include Chinese hamster ovary (CHO) cells, including DHFR⁻CHO cells (Urlaub et al, Proc. Natl. Acad. Sci. USA 77:4216 (1980)); and myeloma cell lines such as V0, NS0 and Sp2/0. For a review of certain mammalian host cell lines suitable for antigen-binding construct production, see, e.g., Yazaki and Wu Methods in Molecular Biology, Vol. 248 (B.K.C. Lo, ed., Humana Press, Totowa, N.J.), pp. 255-268 (2003).

[0255] In some embodiments, the antibody constructs described herein are produced in stable mammalian cells, by a method comprising: transfecting at least one stable mammalian cell with: nucleic acid encoding the antibody construct, in a predetermined ratio; and expressing the nucleic acid in the at least one mammalian cell. In some embodiments, the predetermined ratio of nucleic acid is determined in transient transfection experiments to determine the relative ratio of input nucleic acids that results in the highest percentage of the antigen-binding construct in the expressed product.

[0256] In some embodiments, in the method of producing an antibody construct in stable mammalian cells, the expression product of the stable mammalian cell comprises a larger percentage of the desired glycosylated antigen-binding construct as compared to the monomeric heavy or light chain polypeptides, or other antibodies.

[0257] If required, the antibody constructs can be purified or isolated after expression. Proteins may be isolated or purified in a variety of ways known to those skilled in the art. Standard purification methods include chromatographic techniques, including ion exchange, hydrophobic interaction, affinity, sizing or gel filtration, and reversed-phase, carried out at atmospheric pressure or at high pressure using systems such as FPLC and HPLC. Purification methods also include electrophoretic, immunological, precipitation, dialysis, and chromatofocusing techniques. Ultrafiltration and diafiltration techniques, in conjunction with protein concentration, are also useful. As is well known in the art, a variety of natural proteins bind Fc and antibodies, and these proteins can used for purification of antigen-binding constructs. For example, the bacterial proteins A and G bind to the Fc region. Likewise, the bacterial protein L binds to the Fab region of some antibodies. Purification can often be enabled by a particular fusion partner. For example, antibodies may be purified using glutathione resin if a GST fusion is employed, affinity chromatography if a His-tag is employed, or immobilized anti-flag antibody if a flag-tag is used. For general guidance in suitable purification techniques, see, e.g. incorporated entirely by reference Protein Purification: Principles and Practice, 3^{rd} Ed., Scopes, Springer-Verlag, NY, 1994, incorporated entirely by reference. The degree of purification necessary will vary depending on the use of the antigen-binding constructs. In some instances no purification is necessary.

[0258] In certain embodiments, the antibody constructs may be purified using Anion Exchange Chromatography including, but not limited to, chromatography on Q-sepharose, DEAE sepharose, poros HQ, poros DEAF, Toyopearl Q, Toyopearl QAE, Toyopearl DEAE, Resource/Source Q and DEAF, Fractogel Q and DEAF columns.

[0259] In some embodiments, the antibody constructs are purified using Cation Exchange Chromatography including, but not limited to, SP-sepharose, CM sepharose, poros HS, poros CM, Toyopearl SP, Toyopearl CM, Resource/Source S and CM, Fractogel S and CM columns and their equivalents and comparables.

[0260] In some embodiments, the antibody constructs are expressed using cell-free translation or expression systems. Suitable systems are known in the art, such as for example the method described by Stech et al, in Nature Scientific Reports 7:12030, or those described by Gregorio et al, in Methods Protoc. 2019 2:24.

[0261] In addition, the antibody constructs can be chemically synthesized using techniques known in the art (e.g., see Creighton, 1983, Proteins: Structures and Molecular Principles, W. H. Freeman & Co., N.Y and Hunkapiller et al., Nature, 310:105-111 (1984)). For example, a polypeptide corresponding to a fragment of a polypeptide can be synthesized by use of a peptide synthesizer. Furthermore, if desired, nonclassical amino acids or chemical amino acid analogs can be introduced as a substitution or addition into the polypeptide sequence. Non-classical amino acids include, but are not limited to, to the D-isomers of the common amino acids, 2,4diaminobutyric acid, alpha-amino isobutyric acid, 4-aminobutyric acid, Abu, 2-amino butyric acid, g-Abu, eAhx, 6-amino hexanoic acid, Aib, 2-amino isobutyric acid, 3-amino propionic acid, ornithine, norleucine, norvaline, hydroxyproline, sarcosine, citrulline, homocitrulline, cysteic acid, t-butylglycine, t-butylalanine, phenylglycine, cyclohexylalanine, β-alanine, fluoro-amino acids, designer amino acids such as α-methyl amino acids, C α-methyl amino acids, N α-methyl amino acids, and amino acid analogs in general. Furthermore, the amino acid can be D (dextrorotary) or L (levorotary).

### Post-Translational Modifications

[0262] In certain embodiments, the antibody constructs described herein are differentially modified during or after translation.

[0263] The term “modified,” as used herein, refers to any changes made to a given polypeptide, such as changes to the length of the polypeptide, the amino acid sequence, chemical structure, co-translational modification, or post-translational modification of a polypeptide.

[0264] The term “post-translationally modified” refers to any modification of a natural or non-natural amino acid that occurs to such an amino acid after it has been incorporated into a polypeptide chain. The term encompasses, by way of example only, co-translational in vivo modifications, co-translational in vitro modifications (such as in a cell-free translation system), post-translational in vivo modifications, and post-translational in vitro modifications.

[0265] In some embodiments, the antibody constructs may comprise a modification that is: glycosylation, acetylation, phosphorylation, amidation, derivatization by known protecting/blocking groups, proteolytic cleavage or linkage to an antibody molecule or antigen-binding construct or other cellular ligand, or a combination of these modifications. In some embodiments, the antibody construct is chemically modified by known techniques, including but not limited, to specific chemical cleavage by cyanogen bromide, trypsin, chymotrypsin, papain, V8 protease, NaBH₄; acetylation, formylation, oxidation, reduction; and metabolic synthesis in the presence of tunicamycin.

[0266] Additional optional post-translational modifications of antigen-binding constructs include, for example, N-linked or O-linked carbohydrate chains, processing of N-terminal or C-terminal ends), attachment of chemical moieties to the amino acid backbone, chemical modifications of N-linked or O-linked carbohydrate chains, and addition or deletion f an N-terminal methionine residue as a result of procaryotic host cell expression. The antigen-binding constructs described herein are modified with a detectable label, such as an enzymatic, fluorescent, isotopic or affinity label to allow for detection and isolation of the protein. In certain embodiments, examples of suitable enzyme labels include horseradish peroxidase, alkaline phosphatase, beta-galactosidase, or acetylcholinesterase; examples of suitable prosthetic group complexes include streptavidin biotin and avidin/biotin; examples of suitable fluorescent materials include umbelliferone, fluorescein, fluorescein isothiocyanate, rhodamine, dichlorotriazinylamine fluorescein, dansyl chloride or phycoerythrin; an example of a luminescent material includes luminol; examples of bioluminescent materials include luciferase, luciferin, and aequorin; and examples of suitable radioactive material include iodine, carbon, sulfur, tritium, indium, technetium, thallium, gallium, palladium, molybdenum, xenon, fluorine.

[0267] In some embodiments, antigen-binding constructs described herein may be attached to macrocyclic chelators that associate with radiometal ions.

[0268] In some embodiments, the antibody constructs described herein may be modified by either natural processes, such as post-translational processing, or by chemical modification techniques which are well known in the art. In certain embodiments, the same type of modification may be present in the same or varying degrees at several sites in a given polypeptide. In certain embodiments, polypeptides from antigen-binding constructs described herein are branched, for example, as a result of ubiquitination, and in some embodiments are cyclic, with or without branching. Cyclic, branched, and branched cyclic polypeptides are a result from posttranslation natural processes or made by synthetic methods. Modifications include acetylation, acylation, ADP-ribosylation, amidation, covalent attachment of flavin, covalent attachment of a heme moiety, covalent attachment of a nucleotide or nucleotide derivative, covalent attachment of a lipid or lipid derivative, covalent attachment of phosphotidylinositol, cross-linking, cyclization, disulfide bond formation, demethylation, formation of covalent cross-links, formation of cysteine, formation of pyroglutamate, formylation, gamma-carboxylation, glycosylation, GPI anchor formation, hydroxylation, iodination, methylation, myristylation, oxidation, pegylation, proteolytic processing, phosphorylation, prenylation, racemization, selenoylation, sulfation, transfer-RNA mediated addition of amino acids to proteins such as arginylation, and ubiquitination. (See, for instance, PROTEINS—STRUCTURE AND MOLECULAR PROPERTIES, 2nd Ed., T. E. Creighton, W. H. Freeman and Company. New York (1993); POST-TRANSLATIONAL COVALENT MODIFICATION OF PROTEINS, B. C. Johnson, Ed., Academic Press, New York, pgs. 1-12 (1983); Sealer et al., Meth. Enzymol. 182:626-646 (1990); Rattan et al., Ann, N.Y. Acad. Sci. 663:48-62 (1992)).

[0269] In certain embodiments, antigen-binding constructs described herein may be attached to solid supports, which are particularly useful for immunoassays or purification of polypeptides that are bound by, that bind to, or associate with proteins described herein. Such solid supports include, but are not limited to, glass, cellulose, polyacrylamide, nylon, polystyrene, polyvinyl chloride or polypropylene.

### Additional Optional Modifications

[0270] In one embodiment, the antibody constructs described herein can be further modified (i.e., by the covalent attachment of various types of molecules) such that covalent attachment does not interfere with or affect the ability of the 4-1BB×TAA antibody construct to bind to 4-1BB or to the TAA, or affect the ability of the 4-1BB antibody construct to bind to 4-1BB, or negatively affect the stability of these antibody constructs. Similarly, the 4-1BB antibody constructs and FRα antibody constructs may be modified by covalent attachment such that their stability or ability to bind to their target is not significantly affected. Such modifications include, for example, but not by way of limitation, glycosylation, acetylation, pegylation, phosphorylation, amidation, derivatization by known protecting/blocking groups, proteolytic cleavage, linkage to a cellular ligand or other protein, etc. Any of numerous chemical modifications can be carried out by known techniques, including, but not limited to, specific chemical cleavage, acetylation, formyl anon, metabolic synthesis of tunicamycin, etc.

[0271] Certain embodiments contemplate conjugation of the antibody construct to a drug moiety, for example, a toxin, a chemotherapeutic agent, an immune modulator, or a radioisotope. Numerous methods of preparing antibody drug conjugates (ADCs) are known in the art, Examples include methods described in U.S. Pat. No. 8,624,003 (pot method), U.S. Pat. No. 8,163,888 (one-step), and U.S. Pat. No. 5,208,020 (two-step method). See also, Antibody-Drug Conjugates, Series: Methods in Molecular Biology, Laurent Ducty (Ed.), Humana Press, 2013.

[0272] The drug moiety of the ADCs is typically a compound or moiety having a cytostatic or cytotoxic effect. In some embodiments, the drug comprised by the ADC is a cytotoxic agent. The term “cytotoxic agent” as used herein refers to a substance that inhibits or prevents the function of cells and/or causes destruction of cells. The term is intended to include radioactive isotopes (for example, ³¹¹At, ¹³¹I, ¹²⁵, ⁹⁰Y, ¹⁸⁶Re, ¹⁸⁸Re, ¹⁵³Sm, ²¹²Bi, ³²P and ¹⁷⁷Lu), chemotherapeutic agents, and toxins such as small molecule toxins or enzymatically active toxins of bacterial, fungal, plant or animal origin, including fragments and/or variants thereof. One skilled in the art will appreciate that some of these categories of drugs overlap and are thus not intended to be mutually exclusive. For example, toxins may also be considered as chemotherapeutic agents in the sense that they are chemical compounds that may be used to treat cancer. In some embodiments, the drug comprised by the ADC is an analog or derivative of a naturally occurring toxin. Examples of such naturally occurring toxins include, but are not limited to, maytansines, auristatins, dolastatins, tubulysins, hemiasterlins, calicheamicins, duocarmycins, pyrrolobenzodiazapenes, amatoxins, camptothecins, Pseudomonas exotoxin (PE), diphtheria toxin (DT), deglycosylated ricin A (dg.A) and gelonin.

[0273] In certain embodiments, the drug comprised by the ADCs is a microtubule disrupting agent or a DNA modifying agent. Examples of toxins that are microtubule disrupting agents include, but are not limited to, maytansines, auristatins, dolastatins, tubulysins, hemiasterlins, and analogs and derivatives thereof. Examples of toxins that are DNA modifying agents include, but are not limited to, calicheamicins and other enediyne antibiotics, duocarmycins, pyrrolobenzodiazapenes, amatoxins, camptothecins, and analogs and derivatives thereof.

[0274] Exemplary maytansinoids include DM1 (mertansine, emtansine, N₂′-deacetyl-N₂′-(3-mercapto-1-oxopropyl)maytansine), DM3 (N₂′-deacety)-N₂′-(4-mercapto-1-ipxopentyl)maytansine) and DMH4 (ravtansine, soravtansine, N₂′-deacetyl-N₂′-(4-methyl-4-mercapto-1-oxopentyl)maytansine) (see U.S. Patent Application Publication No. US 2009/0202536). Other examples of naturally occurring, synthetic and semi-synthetic maytansinoids are described in Cassady eta)., 2004. Chem. Pharr. Bull., 52(1):1-26, and in U.S. Pat. Nos.4,256,746; 4,361,650; 4,307,016; 4,294,757; 4,424,219; 4,331,598; 4,364,866; 4,313,946; 4,315,929; 4,362,663; 4,322,348 and 4,371,533.

[0275] Exemplary dolastatins and auristatins include auristatin E (also known in the art as a derivative of dolastatin-10) and auristatin F, and analogs and derivatives thereof. Auristatin analogs include, for example, esters formed between auristatin E and a keto acid. For example, auristatin E can be reacted with paraacetyl benzoic acid or benzoylvaleric acid to produce auristatin EB (AEB) and auristatin EVB (AEVB), respectively. Other typical auristatins include auristatin F phenylenediamine (AFP), monomethylauristatin F (MMAF) and nionomethylauristatin F (MMAE). The synthesis and structure of exemplary auristatins are described in U.S. Pat. Nos. 6,884,869; 7,098,308; 7,256,257; 7,423,116; 7,498,298 and 7,745.394. Other examples of auristatin analogs, in particular analogs suitable for conjugation via the C-terminus of the drug molecule, include those described in International Publication Nos. WO 2002/088172 and WO 2016/041082.

[0276] Exemplary hemiasterlins and herniasterlin analogs and derivatives include those described in International Publication Nos. WO 1996/33211 and WO 2004/026293; U.S. Pat. No. 7,579,323 (which describes the hemiasterlin analog, HTI-286) and International Publication No. WO 2014/144871.

[0277] Exemplary calicheamycins and calicheamycin analogs and derivatives include those described in International Publication No. WO 2015/063680, and U.S. Pat. Nos. 5,773,001; 5,714,586 and 5,770,701).

[0278] Exemplary duocarmycins and duocarmycin analogs and derivatives include naturally-occurring duocarmycins such as duocarmycins A, B1, B2, C1, C2, D and SA, as well as CC-1065, and analogs and derivatives such as adozelesin, bizelesin and centanamycin. Other calicheamicin analogs and derivatives are described in U.S. Pat. Nos. 4,912,227; 5,070,092; 5,084,468; 5,332,837; 5,641,780; 5,739,350 and 8,889,868.

[0279] Exemplary pyrrolobenzodiazapenes (PBD) include various PBD dimers such as those described in U.S. Pat. Nos. 6,884,799; 7,049,311; 7,511,032; 7,528,126; 7,557,099 and 9,056,914, and in International Publication Nos. WO 2007/085930, WO 2009/016516, WO 2011/130598, WO 2011/130613 and WO 2011/130616, and U.S. Patent Application Publication No. US 2011/0256157.

[0280] Exemplary amatoxins include a-Amanitin, b-Amanitin, g-Amanitin and e-Amanitin, and analogs and derivatives thereof. Various amatoxins and amatoxin analogues have been described (see, for example, European Patent No. EP 1 859 811 U.S. Pat. No. 9,233,173 and International Publication No. WO 2014/043403).

[0281] Exemplary camptothecins (CPT) include irinotecan (CPT-11), SN-38 (7-ethyl-10-hydroxy-camptothecin), 10-hydroxy camptothecin, topotecan, lurtotecan, 9-aminocamptothecin and 9-nitrocamptothecin. Other examples of CPT analogs and derivatives include 7-butyl-10-amino-camptothecin and 7-butyl-9-amino-10,11-methylenedioxy-camptothecin (see U.S. Patent Application Publication No. US 2005/0209263) and aniline containing derivatives of these compounds as described in Burke et al., 2009, Bioconj. Chem. 20(6):1242-1250 and Sharkey et al., 2012. Mol. Cancer Ther. 11:224-234.

[0282] In certain embodiments, the drug comprised by the ADC is a chemotherapeutic agent. In some embodiments, the drug comprised by the ADC is an anthracycline, such as doxorubicin, epirubicin, daunorubicin (also known as daunomycin), nemorubicin or an analog or derivative thereof. Derivatization of daunorubicin and doxontbicin for conjugation to antibodies has been described (see, for example, Kratz et al., 2006, Current Med. Chem. 13:477-523, and U.S. Pat. No. 6,630,579).

[0283] Additional examples of drugs for use in the ADCs include mTOR inhibitors such as rapamycin (sirolimus) and analogs thereof (“rapalogs”). Rapalogs are considered to be compounds that are structurally related to rapamycin that retain mTOR inhibiting activity and include, for example, esters, ethers, oximes, hydrazones, and hydroxylamines of rapamycin, as well as compounds in which functional groups on the rapamycin core structure have been modified, for example, by reduction or oxidation. Exemplary rapalogs include, but are not limited to, temsirolimus (CC1779), tacrolimus (FK-506), everolimus (RAD001), deforolimus (AP23573), AZD8055 (AstraZeneca), and OSI-027 (OSI).

[0284] The selected drug may be conjugated to the antibody construct with or without a linker by any of a variety of methods known in the art. Typically, drugs are conjugated to cysteine or lysine residues in the antibody construct via a linker, which may be cleavable or non-cleavable. Exemplary methods and linkers are provided in Antibody-Drug Coningates, Series: Methods in Molecular Biology, Laurent Ducry (Ed.), Humana Press, 2013.

[0285] In some embodiments, the antibody construct may be expressed as fusion proteins comprising a tag to facilitate purification and/or testing etc. As referred to herein, a “tag” is any added series of amino acids which are provided in a protein at either the C-terminus, the N-terminus, or internally that contributes to the identification or purification of the protein. Suitable tags include but are not limited to tags known to those skilled in the art to be useful in purification and/or testing such as albumin binding domain (ABD). His tag, FLAG tag, glutathione-s-transferase, hernagglutinin (HA) and maltose binding protein. Such tagged proteins can also be engineered to comprise a cleavage site, such as a thrombin, enterokinase or factor X cleavage site, for ease of removal of the tag before, during or after purification.

### Methods of Generating Antibodies

[0286] If desired, antibodies to a specific antigen of interest may be generated by standard techniques and used as a basis for the preparation of antigen-binding domains of the 4-1BB×TAA antibody constructs, for example for preparing 4-1BB, FRα, NaPi2B, HER2, ormesothelin or LIV1 antigen-binding domains. Briefly, an antibody to an antigen can be prepared by immunizing the purified antigen into rabbits, preparing serum from blood of the rabbits and absorbing the sera to a normal plasma fraction to produce an antibody specific to the antigen. Monoclonal antibody preparations to the antigen may be prepared by injecting with mouse myeloma cells and using the resultant hybridoma cells to produce the monoclonal antibody. Both of these methods are well-known in the art. In some embodiments, antibodies resulting from these methods may be humanized as described elsewhere herein.

[0287] As an alternative to humanization, human antibodies can be generated. For example, transgenic animals (e.g., mice) can be used that are capable, upon immunization, of producing a full repertoire of human antibodies in the absence of endogenous immunoglobulin production. See, e.g., Jakobovits et al., 1993, Proc. Natl. Acad. Sci. USA 90:2551; Jakobovits et al 1993, Nature 362:255-258; Bruggermann et al., 1993, Year in Immuno. 7:33; and U.S. Pat. Nos. 5,591,669; 5,589,369; 5,545,807; 6,075,181; 6,150,584; 6,657,103; and 6,713,610.

[0288] Alternatively, phage display technology (see, e.g., McCafferty et al., 1990, Nature 348:552-553) can be used to produce human antibodies and antibody fragments in vitro, from immunoglobulin variable (V) domain gene repertoires from unimmunized donors. Phage display can be performed in a variety of formats; for their review see, e.g, Johnson and Chiswell, 1993, Current Opinion in Structural Biology 3:564-571. Human antibodies may also be generated by in vitro activated B cells (see U.S. Pat. Nos. 5,567,610 and 5,229,275). Novel antibody sequences may also be generated de novo using platforms such as the HuTarg™ platform (Innovative Targeting Solutions Inc Vancouver Canada).

[0289] The affinity of antibodies for an antigen may be altered according to methods known in the art.

### Testing the Antibody Constructs

[0290] The ability of the 4-1BB×TAA antibody constructs to bind to 4-1BB and the TAA can be tested according to methods known in the art including antigen-binding assays or cell binding assays. Antigen-binding assays are carried out by incubating the antibody construct with antigen (4-1E113 or TAA), either purified, or in a mixture and assessing the amount of 4-1BB×TAA antibody construct bound to the antigen, compared to controls. The amount of 4-1BB×TAA antibody construct bound to the antigen can by assessed by ELISA, or SPR (surface plasmon resonance), for example. Cell binding assays are carried out by incubating the antibody construct with cells that express 4-1BB or the TAA of interest (such cells are commercially available). The amount of 4-1BB×TAA antibody construct bound to the cells can be assessed by flow cytometry, for example, and compared to binding observed in the presence of controls. Methods for carrying out these types of assays are well known in the art. Similar methods may be used to assess the ability of 4-1BB antibody constructs to bind to 4-1BB. Likewise, the ability of FRα antibody constructs to bind to purified FRα or FRα expressed on cells may be determined.

[0291] The 4-1BB×TAA antibody constructs or 4-1BB antibody constructs may also be tested to determine if they promote activation of cells expressing 4-1BB. Suitable assays include the co-culture assays described in the examples, such as the NR-κB-luciferase/4-1BB-expressing Jurkat cell assay, or the primary T cell co-culture assay. TAA expressing cell lines suitable for use in these assays are readily identified by one of skill in the art. For example, to assess the ability of a 4-1BB×FRα antibody construct to promote activation of 4-1BB in the presence of cells expressing FRα, a number of cell line may be used, for example but not limited to IGROV1, OVCAR3, OVKATE, NCI-H441, NCI-H661, NCI-H1975, or HCC827. These FRα-expressing cell lines can be divided into FRα^{high}, FRα^{mid} and FRα^{low} based on numbers of receptor expressed in these cells as measured by binding of a reference antibody to these cells via, for example, quantitative flow cytometry experiments. In some embodiments, FRα^{high} cells may express greater than about 500,000 FRα molecules per cell, FRα^{mid} between about 200,00( )and about 500,000 FRα molecules per cell and FRα^{low} below about 200,00FRα molecules per cell. In some embodiments, FRα^{neg} cells are those where binding of a reference antibody to FRα cannot be detected by flow cytometry.

[0292] In vivo efficacy of the 4-1BB×TAA antibody constructs, 4-1BB antibody constructs, or FRα antibody constructs may also be evaluated by standard techniques. For example, the effect of the antibody constructs on tumor growth can be examined in various tumor models. Several suitable animal models are known in the art to test the ability of candidate therapies to treat cancers, such as, for example, breast cancers or gastric cancers. Some models are commercially available. Suitable models include syngeneic or xenograft models (see below). The construct to be tested is generally administered after the tumor has been established in the animal, but in some cases, the construct can be administered with the cell line. The volume of the tumor, survival of the animal and/or a response which may correlate with function is monitored in order to determine if the construct is able to treat the tumor. The construct may be administered intravenously (i.v.), intraperitoneally (i.p.) or subcutaneously (s.c.). Dosing schedules and amounts vary but can be readily determined by the skilled person. An exemplary dosage would be 10 mg/kg once weekly. Tumor growth can be monitored by standard procedures. For example, when labelled tumor cells have been used, tumor growth may be monitored by appropriate imaging techniques. For solid tumors, tumor size may also be measured by caliper. Other responses which may be indicative of efficacy of the construct may include increases or decreases in systemic or localized cytokine or chemokine responses (such as but not limited to IFNγ, IL-2, TNFα, CXCL8, IP-10, RANTES), increases or decreases in the number of immune cells (such as NK, NKT, B, DCs, Macrophages, Neutrophils), increase or decrease of the expression of key surface, intracellular or nuclear proteins on or in either the immune cells (such as but not limited to PD1, Tim3, Lag3, 4-1BB, CD163, EOMeS, TOX) or on the surface of the tumour (PDL1). It is further contemplated that these responses can also be assessed in in vitro assays such as the immune cell co-culture assays described herein and in the Examples in order to test the activity of candidate 4-1BB×TAA antibody constructs.

[0293] In vivo mouse tumour models may be syngeneic or xenograft models. Syngeneic models involve grafting a tumour from one mouse to another where the genetic background of the two mice is sufficiently close that the recipient mouse immune system does not reject the tumour (Teicher, B A Tumor models in cancer research, Springer 2011). This can be done either directly from mouse to mouse, or via a cell line that is stable in culture. The cell lines can be engineered using standard molecular biology techniques to express the TAA if they do not naturally, which enables control over expression levels.

[0294] Xenograft tumour models involve the grafting of a tumour from another species (usually human) into a mouse. The mouse would normally reject the tumour as non-self, but is engineered to lack a functional adaptive immune system by a set of mutations which prevent T, B and NK cell development and impair myeloid cell function. Common strains of mice which are suitable for engraftment of human tumour cells are NSG™, NOG™ and NRG mice, which have combined either Prkdc^{scid} or Rag1^{-/-} with IL2rg mutations on a NOD background (Morton et al, Cancer Research 2016:76:21 pp61.53-6158). These mice can be implanted with human tumours, but lack an adaptive immune system. The human tumour cells can come from cells which are stable in cell culture (such as OVCAR3, HCC827, IGROV1 or H1975) or from patients which have had their tumours removed. The immune system can be then be recapitulated by addition of either PBMC, I cells or CD34⁺ HSC from human donors. These immune cells can then reconstitute the host with T cells to act as effectors during an experiment.

### Competitive Binding Analyses and Epitope Mapping of Antibody Sequences

[0295] The 4-1BB epitopes bound by the 4-1BB antibody constructs or the epitopes bound by the FRα antibody constructs described herein can be determined by standard competitive binding analysis (Fendly et al, Cancer Research 50: 1550-1558 (1990)). For example, for 4-1BB, cross-blocking studies may be done on antibodies by direct fluorescence on intact cells engineered to express 4-1BB using suitable methods to quantitate fluorescence. Each test antibody is conjugated with fluorescein isothiocyanate (FITC), using established procedures (Wofsy et al, Selected Methods in Cellular Immunology, p. 287, Mishel and Schiigi (eds.) San Francisco: W.J. Freeman Co. (1980)). Antibodies are considered to share an epitope if each blocked binding of the other by 40% or greater in comparison to an irrelevant antibody control and at the same antibody concentration. Using this assay, one of ordinary skill in the art can identify other antibodies that bind to the same epitope as those described herein. Deletion analysis may be conducted to identify the approximate location in the polypeptide sequence of 4-1BB of the antigenic epitopes. In a similar manner, the epitopes bound by the TAA antigen-binding domains of the 4-1BB×TAA antibody construct, or the FRα antibody construct may also be identified.

### Pharmaceutical Compositions

[0296] Certain embodiments relate to pharmaceutical compositions comprising an antibody construct described herein and a pharmaceutically acceptable carrier.

[0297] The term “pharmaceutically acceptable” means approved by a regulatory agency of the Federal or a state government or listed in the U.S. Pharmacopeia or other generally recognized pharmacopeia for use in animals, and more particularly in humans.

[0298] The term “carrier” refers to a diluent, adjuvant, excipient, vehicle, or combination thereof, with which the construct is administered. Such pharmaceutical carriers can be sterile liquids, such as water and oils, including those of petroleum, animal, vegetable or synthetic origin, such as peanut oil, soybean oil, mineral oil, sesame oil and the like. In some aspects, the carrier is a man-made carrier not found in nature. Water can be used as a carrier when the pharmaceutical composition is administered intravenously. Saline solutions and aqueous dextrose and glycerol solutions can also be employed as liquid carriers, particularly for injectable solutions. Suitable pharmaceutical excipients include starch, glucose, lactose, sucrose, gelatin, malt, rice, flour, chalk, silica gel, sodium stearate, glycerol monostearate, talc, sodium chloride, dried skim milk, glycerol, propylene, glycol, water, ethanol and the like. The composition, if desired, can also contain minor amounts of wetting or emulsifying agents, or pH buffering agents. Examples of suitable pharmaceutical carriers are described in “Remington's Pharmaceutical Sciences” by E. W. Martin.

[0299] The pharmaceutical compositions may be in the form of solutions, suspensions, emulsion, tablets, pills, capsules, powders, sustained-release formulations and the like. The composition may be formulated as a suppository, with traditional binders and carriers such as triglycerides. Oral formulations may include standard carriers such as pharmaceutical grades of mannitol, lactose, starch, magnesium stearate, sodium saccharine, cellulose, magnesium carbonate, and the like.

[0300] Pharmaceutical compositions will contain a therapeutically effective amount of the antibody construct, together with a suitable amount of carrier so as to provide the form for proper administration to a patient. The formulation should suit the mode of administration.

[0301] In certain embodiments, the composition comprising the antibody construct is formulated in accordance with routine procedures as a pharmaceutical composition adapted for intravenous administration to human beings. Typically, compositions for intravenous administration are solutions in sterile isotonic aqueous buffer. Where necessary, the composition may also include a solubilizing agent and a local anaesthetic such as lignocaine to ease pain at the site of the injection. Generally, the ingredients are supplied either separately or mixed together in unit dosage form, for example, as a dry lyophilized powder or water free concentrate in a hermetically sealed container such as an ampoule or sachette indicating the quantity of active agent. Where the composition is to be administered by infusion, it can be dispensed with an infusion bottle containing sterile pharmaceutical grade water or saline. Where the composition is administered by injection, an ampoule of sterile water for injection or saline can be provided so that the ingredients may be mixed prior to administration.

[0302] In certain embodiments, the compositions described herein are formulated as neutral or salt forms. Pharmaceutically acceptable salts include those formed with anions such as those derived from hydrochloric, phosphoric, acetic, oxalic, tartaric acids, etc., and those formed with cations such as those derived from sodium, potassium, ammonium, calcium, ferric hydroxide isopropylamine, triethylamine, 2-ethylamino ethanol, histidine, procaine, and the like.

### Methods of Using the Antibody Constructs

[0303] In certain embodiments, provided is a method of treating a cancer comprising administering to a subject in which such treatment, prevention or amelioration is desired, a 4-1BB×TAA antibody construct described herein, in an amount effective to treat or ameliorate the cancer. In other embodiments, there is provided a method of using the 4-1BB×TAA antibody construct in the preparation of a medicament for the treatment, prevention, or amelioration of cancer in a subject. In additional embodiments, the 4-1BB×TAA antibody constructs may be used for the treatment of cancer in a subject in need thereof. The 4-1BB antibody construct and FRα antibody constructs may also be used in the treatment of cancer as described below.

[0304] In some embodiments, the 4-1BB×TAA antibody construct, 4-1BB antibody construct, or FRα antibody construct may be used in a subject to treat, prevent or ameliorate a cancer selected from breast cancer, bladder cancer, colorectal cancer, head and neck cancer, liver cancer, lung cancer, ovarian cancer, pancreatic cancer, skin cancer, prostate cancer, kidney cancer or thyroid cancer. In specific embodiments, the 4-1BB×TAA antibody construct may be used to treat, prevent or ameliorate lung or ovarian cancers in a subject. In certain embodiments, the 4-1BB×TAA antibody construct may be used in the treatment of solid tumors, in embodiments where the 4-1BB×TAA is a 4-1BB×FRα antibody construct, the construct may be used to treat, prevent or ameliorate lung or ovarian cancers in a subject. In embodiments where the 4-1BB×TAA is a 4-1BB×NaPi2b antibody construct, the construct may be used to treat, prevent or ameliorate lung cancer in a subject.

[0305] The term “subject” refers to an animal, in some embodiments a mammal, which is the object of treatment, observation or experiment. An animal may be a human, a non-human primate, a companion animal (e.g., dogs, cats, and the like), farm animal (e.g., cows, sheep, pigs, horses, and the like) or a laboratory animal (e.g., rats, mice, guinea pigs, and the like).

[0306] The term “mammal” as used herein includes but is not limited to humans, non-human primates, canines, felines, murines, bovines, equines, and porcines.

[0307] “Treatment” or “treat” refers to clinical intervention in an attempt to alter the natural course of the individual or cell being treated, and can be performed during the course of clinical pathology. Desirable effects of treatment include preventing recurrence of disease, alleviation of symptoms, diminishing of any direct or indirect pathological consequences of the disease, preventing metastasis, decreasing the rate of disease progression, amelioration or palliation of the disease state, and remission or improved prognosis. In some embodiments, the 4-1BB×TAA antibody constructs described herein are used to delay development of a disease or disorder in a subject. In one embodiment, 4-1BB×TAA antibody constructs and methods described herein effect tumor regression in a subject. In one embodiment, the 4-1BB×TAA antibody constructs and methods described herein effect inhibition of tumor/cancer growth in a subject.

[0308] The term “effective amount” as used herein refers to that amount of antibody construct being administered, which will accomplish the goal of the recited method, e.g., relieve to some extent one or more of the symptoms of the disease, condition or disorder being treated. The amount of the composition described herein which will be effective in the treatment, inhibition and prevention of a disease or disorder associated with aberrant expression and/or activity of a therapeutic protein can be determined by standard clinical techniques. In addition, in vitro assays may optionally be employed to help identify optimal dosage ranges. The precise dose to be employed in the formulation will also depend on the route of administration, and the seriousness of the disease or disorder, and should be decided according to the judgment of the practitioner and each patient's circumstances. Effective doses are extrapolated from dose-response curves derived from in vitro or animal model test systems.

[0309] “Therapeutically effective amount,” as used herein, is meant an amount that produces the desired effect for which it is administered. In some embodiments, the term refers to an amount that is sufficient, when administered to a population suffering from or susceptible to a disease, disorder, and/or condition in accordance with a therapeutic dosing regimen, to treat the disease, disorder, and/or condition. In some embodiments, a therapeutically effective amount is one that reduces the incidence and/or severity of, and/or delays onset of, one or more symptoms of the disease, disorder, and/or condition. Those of ordinary skill in the art will appreciate that the term “therapeutically effective amount” does not in fact require successful treatment be achieved in a particular individual. Rather, a therapeutically effective amount may be that amount that provides a particular desired pharmacological response in a significant number of subjects when administered to patients in need of such treatment. In some embodiments, reference to a therapeutically effective amount may be a reference to an amount as measured in one or more specific tissues (e.g., a tissue affected by the disease, disorder or condition) or fluids (e.g., blood, saliva, serum, sweat, tears, urine, etc.). Those of ordinary skill in the art will appreciate that, in some embodiments, a therapeutically effective amount of a particular agent or therapy may be formulated and/or administered in a single dose. In some embodiments, a therapeutically effective agent may be formulated and/or administered in a plurality of doses, for example, as part of a dosing regimen.

[0310] The 4-1BB×TAA antibody construct can be administered to a subject. Various delivery systems are known and can be used to administer an antibody construct formulation described herein, e.g., encapsulation in liposomes, microparticles, microcapsules, recombinant cells capable of expressing the compound, receptor-mediated endocytosis (see, e.g., Wu and Wu, J. Biol. Chem. 262:44294432 (1987)), construction of a nucleic acid as part of a retroviral or other vector, etc. Methods of introduction include but are not limited to intradermal, intramuscular, intraperitoneal, intravenous, subcutaneous, intranasal, epidural, and oral routes. The compounds or compositions may be administered by any convenient route, for example by infusion or bolus injection, by absorption through epithelial or mucocutaneous linings (e.g., oral mucosa, rectal and intestinal mucosa, etc.) and may be administered together with other biologically active agents. Administration can be systemic or local. In addition, in certain embodiments, it is desirable to introduce the antibody construct compositions described herein into the central nervous system by any suitable route, including intraventricular and intrathecal injection; intraventricular injection may be facilitated by an intraventricular catheter, for example, attached to a reservoir, such as an Ommaya reservoir. Pulmonary administration can also be employed, e.g., by use of an inhaler or nebulizer, and formulation with an aerosolizing agent.

[0311] In a specific embodiment, it is desirable to administer the antibody constructs, or compositions described herein locally to the area in need of treatment; this may be achieved by, for example, and not by way of limitation, local infusion during surgery, topical application, e.g., in conjunction with a wound dressing after surgery, by injection, by means of a catheter, by means of a suppository, or by means of an implant, said implant being of a porous, non-porous, or gelatinous material, including membranes, such as sialastic membranes, or fibers. Preferably, when administering a protein, including an antibody construct, described herein, care must be taken to use materials to which the protein does not absorb.

[0312] In another embodiment, the antibody constructs or composition can be delivered in a vesicle, in particular a liposome (see Langer, Science 249:1527-1533 (1990); Treat et al., in Liposomes in the Therapy of Infectious Disease and Cancer, Lopez-Berestein and Fidler (eds.), Liss, New York, pp. 353-365 (1989); Lopez-Berestein, ibid., pp. 317-327; see generally ibid.)

[0313] In yet another embodiment, the antibody constructs or composition can be delivered in a controlled release system. In one embodiment, a pump may be used (see Langer, supra; Sefton, CRC Crit. Ref. Biomed. Eng. 14:201 (1987); Buchwald et al., Surgery 88:507 (1980); Saudek et al., N. Engl. J. Med. 321:574 (1989)). In another embodiment, polymeric materials can be used (see Medical Applications of Controlled Release, Langer and Wise (eds.), CRC Pres., Boca Raton, Fla. (1974); Controlled Drug Bioavailability, Drug Product Design and Performance, Smolen and Ball (eds.), Wiley, New York (1984); Ranger and Peppas, J., Macromol. Sci. Rev. Macromol. Chem. 23:61 (1983); see also Levy et al., Science 228:190 (1985); During et al., Ann. Neurol. 25:351 (1989); Howard et al., J. Neurosurg. 71:105 (1989)). In yet another embodiment, a controlled release system can be placed in proximity of the therapeutic target, e.g., the brain, thus requiring only a fraction of the systemic dose (see, e.g., Goodson, in Medical Applications of Controlled Release, vol. 2, pp. 115-138 (1984)).

[0314] In a specific embodiment comprising a nucleic acid encoding the antibody constructs described herein, the nucleic acid can be administered in vivo to promote expression of its encoded protein, by constructing it as part of an appropriate nucleic acid expression vector and administering it so that it becomes intracellular, e.g., by use of a retroviral vector (see U.S. Pat. No. 4,980,286), or by direct injection, or by use of microparticle bombardment (e.g., a gene gun; Biolistic, Dupont), or coating with lipids or cell-surface receptors or transfecting agents, or by administering it in linkage to a homeobox-like peptide which is known to enter the nucleus (see e.g., Joliot et al., Proc. Natl. Acad. Sci. USA 88:1864-1868 (1991)), etc. Alternatively, a nucleic acid can be introduced intracellularly and incorporated within host cell DNA for expression, by homologous recombination.

[0315] The amount of the antibody construct which will be effective in the treatment, inhibition or prevention of a disease or disorder can be determined by standard clinical techniques. In addition, in vitro assays may optionally be employed to help identify optimal dosage ranges. The precise dose to be employed in the formulation will also depend on the route of administration, and the seriousness of the disease or disorder, and should be decided according to the judgment of the practitioner and each patient's circumstances. Effective doses are extrapolated from dose-response curves derived from in vitro or animal model test systems.

[0316] The antibody constructs described herein may be administered alone or in combination with other alternate forms of treatments or anti-cancer therapy (e.g., radiation therapy, chemotherapy, hormonal therapy, immunotherapy, bi specific antibodies, and anti-tumor agents). Generally, administration of products of a species origin or species reactivity (in the case of antibodies) that is the same species as that of the patient is preferred.

[0317] In some embodiments, the antibody construct may be used in the treatment of a patient who has undergone one or more alternate forms of anti-cancer therapy. In some embodiments, the patient has relapsed or failed to respond to one or more alternate forms of anti-cancer therapy, In other embodiments, the antibody construct is administered to a patient in combination with one or more alternate forms of anti-cancer therapy. In other embodiments, the antibody construct is administered to a patient that has become refractory to treatment with one or more alternate forms of anti-cancer therapy.

### Kits and Articles of Manufacture

[0318] Also described herein are kits comprising one or more antibody constructs. Individual components of the kit would be packaged in separate containers and, associated with such containers, can be a notice in the form prescribed by a governmental agency regulating the manufacture, use or sale of pharmaceuticals or biological products, which notice reflects approval by the agency of manufacture, use or sale. The kit may optionally contain instructions or directions outlining the method of use or administration regimen for the antibody construct.

[0319] When one or more components of the kit are provided as solutions, for example an aqueous solution, or a sterile aqueous solution, the container means may itself be an inhalant, syringe, pipette, eye dropper, or other such like apparatus, from which the solution may be administered to a subject or applied to and mixed with the other components of the kit.

[0320] The components of the kit may also be provided in dried or lyophilized form and the kit can additionally contain a suitable solvent for reconstitution of the lyophilized components. Irrespective of the number or type of containers, the kits described herein also may comprise an instrument for assisting with the administration of the composition to a patient. Such an instrument may be an inhalant, nasal spray device, syringe, pipette, forceps, measured spoon, eye dropper or similar medically approved delivery vehicle.

[0321] Certain embodiments relate to an article of manufacture containing materials useful for treatment of a patient as described herein. The article of manufacture comprises a container and a label or package insert on or associated with the container. Suitable containers include, for example, bottles, vials, syringes, intravenous solution bags, etc. The containers may be formed from a variety of materials such as glass or plastic. The container holds a composition comprising the antibody construct which is by itself or combined with another composition effective for treating the patient and may have a sterile access port (for example the container may be an intravenous solution bag or a vial having a stopper pierceable by a hypodermic injection needle). The label or package insert indicates that the composition is used for treating the condition of choice. In some embodiments, the article of manufacture may comprise (a) a first container with a composition contained therein, wherein the composition comprises an antibody construct described herein; and (b) a second container with a composition contained therein, wherein the composition in the second container comprises a further cytotoxic or otherwise therapeutic agent. In such embodiments, the article of manufacture may further comprise a package insert indicating that the compositions can be used to treat a particular condition, Alternatively, or additionally, the article of manufacture may further comprise a second (or third) container comprising a pharmaceutically-acceptable buffer, such as bacteriostatic water for injection (BWFI), phosphate-buffered saline, Ringer's solution and dextrose solution. The article of manufacture may optionally further include other materials desirable from a commercial and user standpoint, including other buffers, diluents, filters, needles, and syringes.

### Polypeptides and Polynucleotides

[0322] As described herein, the antibody constructs comprise at least one polypeptide. Certain embodiments relate to polynucleotides encoding such polypeptides described herein.

[0323] The antibody constructs, polypeptides and polynucleotides described herein are typically isolated. As used herein, “isolated” means an agent (e.g., a polypeptide or polynucleotide) that has been identified and separated and/or recovered from a component of its natural cell culture environment. Contaminant components of its natural environment are materials that would interfere with diagnostic or therapeutic uses for the antibody construct, and may include enzymes, hormones, and other proteinaceous or non-proteinaceaous solutes. Isolated also refers to an agent that has been synthetically produced, e.g., via human intervention.

[0324] The terms “polypeptide,” “peptide” and “protein” are used interchangeably herein to refer to a polymer of amino acid residues. That is, a description directed to a poly peptide applies equally to a description of a peptide and a description of a protein, and vice versa. The terms apply to naturally occurring amino acid polymers as well as amino acid polymers in which one or more amino acid residues is a non-naturally encoded amino acid. As used herein, the terms encompass amino acid chains of any length, including full-length proteins, wherein the amino acid residues are linked by covalent peptide bonds.

[0325] The term “amino acid” refers to naturally occurring and non-naturally occurring amino acids, as well as amino acid analogs and amino acid mimetics that function in a manner similar to the naturally occurring amino acids. Naturally encoded amino acids are the 20 common amino acids (alanine, arginine, asparagine, aspartic acid, cysteine, glutamine, glutamic acid, glycine, histidine, isoleucine, leucine, lysine, methionine, phenylalanine, proline, serine, threonine, tryptophan, tyrosine, and valine) and pyrrolysine and selenocysteine. Amino acid analogs refers to compounds that have the same basic chemical structure as a naturally occurring amino acid, i.e., an a carbon that is bound to a hydrogen, a carboxyl group, an amino group, and an R group, such as, homoserine, norleucine, methionine sulfoxide, methionine methyl sulfonium. Such analogs have modified R groups (such as, norleucine) or modified peptide backbones, but retain the same basic chemical structure as a naturally occurring amino acid. Reference to an amino acid includes, for example, naturally occurring proteogenic L-amino acids; D-amino acids, chemically modified amino acids such as amino acid variants and derivatives; naturally occurring non-proteogenic amino acids such as β-alanine, ornithine, etc.; and chemically synthesized compounds having properties known in the art to be characteristic of amino acids. Examples of non-naturally occurring amino acids include, but are not limited to, α-methyl amino acids (e.g. α-methyl alanine), D-amino acids, histidine-like amino acids (e.g., 2-amino-histidine, β-hydroxy-histidine, homohistidine), amino acids having an extra methylene in the side chain (“homo” amino acids), and amino acids in which a carboxylic acid functional group in the side chain is replaced with a sulfonic acid group (e.g., cysteic acid). The incorporation of non-natural amino acids, including synthetic non-native amino acids, substituted amino acids, or one or more D-amino acids into the antibody constructs described herein may be advantageous in a number of different ways. D-amino acid-containing peptides, etc., exhibit increased stability in vitro or in vivo compared to L-amino acid-containing counterparts. Thus, the construction of peptides, etc., incorporating D-amino acids can be particularly useful when greater intracellular stability is desired or required. More specifically, D-peptides, etc., are resistant to endogenous peptidases and proteases, thereby providing improved bioavailability of the molecule, and prolonged lifetimes in vivo when such properties are desirable. Additionally, D-peptides, etc., cannot be processed efficiently for major histocompatibility complex class II-restricted presentation to T helper cells, and are therefore, less likely to induce humoral immune responses in the whole organism.

[0326] Amino acids may be referred to herein by either their commonly known three letter symbols or by the one-letter symbols recommended by the IUPAC-IUB Biochemical Nomenclature Commission. Nucleotides, likewise, may be referred to by their commonly accepted single-letter codes.

[0327] Also included herein are polynucleotides encoding polypeptides of the antibody constructs. The term “polynucleotide” or “nucleotide sequence” is intended to indicate a consecutive stretch of two or more nucleotide molecules. The nucleotide sequence may be of genomic, cDNA, RNA, semisynthetic or synthetic origin, or any combination thereof.

[0328] The term “nucleotide sequence” or “nucleic acid sequence” is intended to indicate a consecutive stretch of two or more nucleotide molecules. The nucleotide sequence can be of genomic, cDNA, RNA, semisynthetic or synthetic origin, or any combination thereof.

[0329] “Cell”, “host cell”, “cell line” and “cell culture” are used interchangeably herein and all such terms should be understood to include progeny resulting from growth or culturing of a cell. “Transformation” and “transfection” are used interchangeably to refer to the process of introducing a nucleic acid sequence into a cell.

[0330] The term “nucleic acid” refers to deoxyribonucleotides, deoxyribonucleosides, ribonucleosides, or ribonucleotides and polymers thereof in either single- or double-stranded form. Unless specifically limited, the term encompasses nucleic acids containing known analogues of natural nucleotides that have similar binding properties as the reference nucleic acid and are metabolized in a manner similar to naturally occurring nucleotides. Unless specifically limited otherwise, the term also refers to oligonucleotide analogs including PNA (peptidonucleic acid), analogs of DNA used in antisense technology (phosphorothioates, phosphoroamidates, and the like). Unless otherwise indicated, a particular nucleic acid sequence also implicitly encompasses conservatively modified variants thereof (including but not limited to, degenerate codon substitutions) and complementary sequences as well as the sequence explicitly indicated. Specifically, degenerate codon substitutions may be achieved by generating sequences in which the third position of one or more selected (or all) codons is substituted with mixed-base and/or deoxyinosine residues (Batzer et al., Nucleic Acid Res. 19:5081 (1991); Ohtsuka et al., J. Biol, Chem. 260:2605-2608 (1985); Rossolini et al., Mol. Cell. Probes 8:91-98 (1994)).

[0331] “Conservatively modified variants” applies to both amino acid and nucleic acid sequences. With respect to particular nucleic acid sequences, “conservatively modified variants” refers to those nucleic acids which encode identical or essentially identical amino acid sequences, or where the nucleic acid does not encode an amino acid sequence, to essentially identical sequences. Because of the degeneracy of the genetic code, a large number of functionally identical nucleic acids encode any given protein. For instance, the codons GCA, GCC, GCG and GCU all encode the amino acid alanine. Thus, at every position where an alanine is specified by a codon, the codon can be altered to any of the corresponding codons described without altering the encoded polypeptide. Such nucleic acid variations are “silent variations,” which are one species of conservatively modified variations. Every nucleic acid sequence herein that encodes a polypeptide also encompasses every possible silent variation of the nucleic acid. One of ordinary skill in the art will recognize that each codon in a nucleic acid (except AUG, which is ordinarily the only codon for methionine, and TGG, which is ordinarily the only codon for tryptophan) can be modified to yield a functionally identical molecule. Accordingly, each silent variation of a nucleic acid that encodes a polypeptide is implicit in each described sequence.

[0332] As to amino acid sequences, one of ordinary skill in the art will recognize that individual substitutions, deletions or additions to a nucleic acid, peptide, polypeptide, or protein sequence which alters, adds or deletes a single amino acid or a small percentage of amino acids in the encoded sequence is a “conservatively modified variant” where the alteration results in the deletion of an amino acid, addition of an amino acid, or substitution of an amino acid with a chemically similar amino acid.

[0333] Conservative substitution tables providing functionally similar amino acids are known to those of ordinary skill in the art. Such conservatively modified variants are in addition to and do not exclude polymorphic variants, interspecies homologs, and alleles described herein. The following eight groups each contain amino acids that are conservative substitutions for one another: 1) Alanine (A), Glycine (G); 2) Aspartic acid (D), Glutamic acid (E); 3) Asparagine (N), Glutamine (Q); 4) Arginine (R), Lysine (K); 5) Isoleucine (I), Leucine (L), Methionine (M), Valine (V); 6) Phenylalanine (F), Tyrosine (Y), Tryptophan (W); 7) Serine (S), Threonine (T); and [0139] 8) Cysteine (C), r′vlethionine (M) (see, e.g., Creighton, Proteins: Structures and Molecular Properties (W H Freeman & Co.; 2nd edition (December 1993).

[0334] The term “identical” in the context of two or more nucleic acids or polypeptide sequences, refers to two or more sequences or subsequences that are the same. Sequences are “substantially identical” if they have a percentage of amino acid residues or nucleotides that are the same (i.e., about 60% identity, about 65%, about 70%, about 75%, about 80%, about 85%, about 90%, or about 95% identity over a specified region), when compared and aligned for maximum correspondence over a comparison window, or designated region as measured using one of the following sequence comparison algorithms (or other algorithms available to persons of ordinary skill in the art) or by manual alignment and visual inspection. This definition also refers to the complement of a test sequence. The identity can exist over a region that is at least about 50 amino acids or nucleotides in length, or over a region that is 75100 amino acids or nucleotides in length, or, where not specified, across the entire sequence of a polynucleotide or polypeptide. A polynucleotide encoding a polypeptide described herein, including homologs from species other than human, may be obtained by a process comprising the steps of screening a library under stringent hybridization conditions with a labeled probe having a polynucleotide sequence described herein or a fragment thereof, and isolating full-length cDNA and genomic clones containing said polynucleotide sequence. Such hybridization techniques are well known to the skilled artisan.

[0335] For sequence comparison, typically one sequence acts as a reference sequence, to which test sequences are compared. When using a sequence comparison algorithm, test and reference sequences are entered into a computer, subsequence coordinates are designated, if necessary, and sequence algorithm program parameters are designated. Default program parameters can be used, or alternative parameters can be designated. The sequence comparison algorithm then calculates the percent sequence identities for the test sequences relative to the reference sequence, based on the program parameters.

[0336] A “comparison window”, as used herein, includes reference to a segment of any one of the number of contiguous positions selected from the group consisting of from 20 to 600, usually about 50 to about 200, more usually about 100 to about 150 in which a sequence may be compared to a reference sequence of the same number of contiguous positions after the two sequences are optimally aligned. Methods of alignment of sequences for comparison are known to those of ordinary skill in the art. Optimal alignment of sequences for comparison can be conducted, including but not limited to, by the local homology algorithm of Smith and Waterman (1970) Adv. Appl. Math. 2:482c, by the homology alignment algorithm of Needleman and Wunsch (1970) J. Mol. Biol. 48:443, by the search for similarity method of Pearson and Lipman (1988) Proc. Nat'l. Acad. Sci. USA 85:2444, by computerized implementations of these algorithms (GAP. BESTFIT, FASTA, and TFASTA in the Wisconsin Genetics Software Package, Genetics Computer Group, 575 Science Dr., Madison, Wis.), or by manual alignment and visual inspection (see, e.g., Ausubel et al., Current Protocols in Molecular Biology (1995 supplement)).

[0337] One example of an algorithm that is suitable for determining percent sequence identity and sequence similarity are the BLAST and BLAST 2.0 algorithms, which are described in Altschul et al. (1997) Nuc. Acids Res, 25:3389-3402, and Altschul et al, (1990) J. Mol. Biol. 215:403-410, respectively. Software for performing BLAST analyses is publicly available through the National Center for Biotechnology Information available at the World Wide Web at nebi.nlm.nih.gov. The BLAST algorithm parameters W, T, and X determine the sensitivity and speed of the alignment. The BLASTN program (for nucleotide sequences) uses as defaults a wordlength (W) of 11, an expectation (F) or 10, M=5, N=−4 and a comparison of both strands. For amino acid sequences, the BLASTP program uses as defaults a wordlength of 3, and expectation (E) of 10, and the BLOSUM62 scoring matrix (see Henikoff and Henikoff (1992) Proc. Natl. Acad. Sci. USA 89:10915) alignments (B) of 50, expectation (E) of 10, M=5, N=−4, and a comparison of both strands. The BLAST algorithm is typically performed with the “low complexity” filter turned off.

[0338] The BLAST algorithm also performs a statistical analysis of the similarity between two sequences (see, e.g., Karlin and Altschul (1993) Proc. Natl. Acad. Sci. USA 90:5873-5787). One measure of similarity provided by the BLAST algorithm is the smallest sum probability (P(N)), which provides an indication of the probability by which a match between two nucleotide or amino acid sequences would occur by chance. For example, a nucleic acid is considered similar to a reference sequence if the smallest sum probability in a comparison of the test nucleic acid to the reference nucleic acid is less than about 0.2, or less than about 0.01, or less than about 0.001.

[0339] As used herein, the term “engineer,” and grammatical variations thereof is considered to include any manipulation of a peptide backbone or the post-translational modifications of a naturally occurring or recombinant polypeptide or fragment thereof. Engineering includes modifications of the amino acid sequence, of the glycosylation pattern, or of the side chain group of individual amino acids, as well as combinations of these approaches. The engineered proteins are expressed and produced by standard molecular biology techniques.

[0340] A derivative, or a variant of a polypeptide is said to share “homology” or be “homologous” with the polypeptide if the amino acid sequences of the derivative or variant has at least 50% identity with a 100 amino acid sequence from the original polypeptide. In certain embodiments, the derivative or variant is at least 75% the same as that of either the polypeptide or a fragment of the polypeptide having the same number of amino acid residues as the derivative. In various embodiments, the derivative or variant is at least 85%, 90%, 95% or 99% the same as that of either the polypeptide or a fragment of the polypeptide having the same number of amino acid residues as the derivative.

[0341] In some aspects, an antibody construct comprises an amino acid sequence that is at least 80, 85, 90, 91, 92, 93, 94, 95, 96, 97, 98, 99, or 100% identical to a relevant amino acid sequence or fragment thereof set forth in the Tables or Accession Numbers disclosed herein. In some aspects, an isolated antibody construct comprises an amino acid sequence encoded by a polynucleotide that is at least 80, 85, 90, 91, 92, 93, 94, 95, 96, 97, 98, 99, or 100% identical to a relevant nucleotide sequence or fragment thereof set forth in Tables or Accession Numbers disclosed herein.

### Embodiments

[0342] A1. An antibody construct comprising:
   [0343] a) a first 4-1BB-binding domain that binds to a 4-1BB extracellular domain (4-1BB ECD), and
   [0344] b) a tumor-associated antigen (TAA) antigen binding domain (TAA antigen-binding domain) that binds to a TAA.
      wherein the first 4-1BB-binding domain and the TAA antigen-binding domain are linked directly or indirectly to a scaffold.
[0345] A2. The antibody construct according to embodiment A1, wherein the first 4-1BB binding domain is a first 4-1BB antigen-binding domain or a 4-1BB ligand.
[0346] A3. The antibody construct according to embodiment A2, wherein the first 4-1BB antigen-binding domain binds to a first epitope of 4-1BB ECD.
[0347] A4. The antibody construct according to any one of embodiments A1 to A3, further comprising a second 4-1BB binding domain.
[0348] A5. The antibody construct according to embodiment A4, wherein the second 4-1BB binding domain is a second 4-1BB antigen-binding domain.
[0349] A6. The antibody construct according to embodiment A5, wherein the second 4-1BB antigen-binding domain binds to a second epitope of 4-1BB ECD.
[0350] A7. The antibody construct according to embodiment A5 or A6, wherein the first epitope of 4-1BB ECD is the same as the second epitope of 4-1BB ECD.
[0351] A8. The antibody construct according to embodiment A5 or A6, wherein the first epitope of 4-1BB ECD is different from the second epitope of 4-1.BB ECD.
[0352] A9. The antibody construct according to any one of embodiments A4 to A8, wherein the first or second 4-1BB antigen-binding domain binds to human and cynomolgus 4-1BB.
[0353] A10. The antibody construct according to any one of embodiments A4 to A9, wherein the 4-1BB antigen-binding domain binds to domain 1 or domain 2 of 4-1BB.
[0354] A11. The antibody construct according to any one of embodiments A4 to A9, wherein the 4-1BB antigen-binding domain binds to other than domains 3 and 4 or 4-1BB.
[0355] A12. The antibody construct according to any one of embodiments A1 to A9, wherein the first 4-1BB-binding domain is a first 4-1BB antigen-binding domain comprising a heavy chain variable sequence comprising three CDRs and light: chain variable sequence comprising three CDRs and the heavy chain variable sequence and the light chain variable sequence is from any one of variants v28726, v28727, v28728, v28730, v20022, v28700, v28704, v28705, v28706, v28711, v28712, v28713, v20036, v28696, v28697, v28698, v28701, v28702, v28703, v28707, v20023, v28683, v28684, v28685, v28686, v28687, v28688, v28689, v28690, v28691, v28692, v28694, or v28995.
[0356] A13, The antibody construct according to any one of embodiments A4 to A12, wherein the first 4-1BB antigen-binding domain and/or the second 4-1BB antigen-binding domain are in a Fab format.
[0357] A14. The antibody construct according to any one of embodiments A4 to A12, wherein one of the first 4-1BB antigen-binding domain or the second 4-1BB antigen-binding domain is in an scFv format.
[0358] A15. The antibody construct according to any one of embodiments A1 to A14, wherein the TAA antigen-binding domain is a folate receptor-α (FRα) antigen-binding domain, a Solute Carrier Family 34 Member 2 (NaPi2b) antigen-binding domain, a HER2 antigen-binding domain, a mesothelin antigen-binding domain, or a Solute Carrier Family 39 Member 6 (LIV-1) antigen-binding domain.
[0359] A16, The antibody construct according to any one of embodiments A1 to A15 wherein the TAA antigen-binding domain is a Ma antigen-binding domain.
[0360] A17, The antibody construct according to embodiment A16, wherein the FRα antigen-binding domain comprises the three heavy chain CDRs and the three light chain CDRs of antibody 8K22 or 1H06.
[0361] A18. The antibody construct according to embodiment A17, wherein the FRα antigen-binding domain is a human or humanized antigen-binding domain.
[0362] A19. The antibody construct according to any one of embodiments A1 to A18, wherein the TAA antigen-binding domain is in an scFv format.
[0363] A20. The antibody construct according to any one of embodiments A1 to A18, wherein the TAA antigen-binding domain is in a Fab format.
[0364] A21. The antibody construct according to any one of embodiments A1 to A20, wherein the scaffold is a dimeric Fc construct having a first Fc polypeptide and a second Fc polypeptide, each Fc polypeptide comprising a CH3 sequence, or wherein the scaffold is a linker or an albumin polypeptide.
[0365] A22. The antibody construct according to embodiment A21, wherein the scaffold is a heterodimeric Fc construct having a first Fc polypeptide that is different fr©m the second Fc polypeptide, and wherein the CH3 sequences of the first Fc polypeptide and the second. Fc polypeptide comprise amino acid substitutions that promote the formation of a heterodimeric Fc.
[0366] A23. The antibody construct according to embodiment A22, wherein:
   [0367] a) one Fc polypeptide comprises the amino acid substitutions T350V_L351Y_F405A_Y407V and the other Fc polypeptide comprises the amino acid substitutions T350V_T366L_K392L_T394W;
   [0368] b) one Fc polypeptide comprises the amino acid substitutions T350V_T366L_K392M_T394W and the other Fc polypeptide comprises the amino acid substitutions T350V_L351Y_F405A_Y407V;
   [0369] c) one Fc polypeptide comprises the amino acid substitutions L351Y_F405A_Y407V and the other Fc polypeptide comprises the amino acid substitutions T366L_K392M_T394W;
   [0370] d) one Fc polypeptide comprises the amino acid substitutions L351Y_F405A_Y407V and the other Fc polypeptide comprises the amino acid substitutions T366L_K392L_T394W; or
   [0371] e) one Fc polypeptide comprises the amino acid substitutions L351Y_S400E_F405A_Y407V and the other Fc polypeptide comprises the amino acid substitutions T366I_N390R_K392M_T394W,
   [0372] wherein the numbering of residues is according to the EU numbering system.
[0373] A24. The antibody construct according to any one of embodiments A21 to A23, further comprising one or more amino acid modifications that reduce effector function.
[0374] A25. The antibody construct according to any one of embodiments A21 to A24, wherein the first 4-1BB antigen-binding domain is linked to the N terminus of the first Fc polypeptide, and the TAA antigen-binding domain is linked to the C terminus of the first Fc polypeptide.
[0375] A26. The antibody construct according to embodiment A25, further comprising a second 4-1BB antigen-binding domain is linked to the N terminus of the second Fc polypeptide.
[0376] A27. An antibody construct or antigen-binding fragment thereof, that specifically binds to 4-1BB, comprising: a heavy chain variable sequence comprising three CDRs and light chain variable sequence comprising three CDRs and the heavy chain variable sequence and the light chain variable sequence is from any one of variants v28726, v28727, v28728, v28730, v20022, v28700, v28704, v28705, v28706, v28711, v28712, v28713, v20036, v28696, v28697, v28698, v28701, v28702, v28703, v28707, v20023, v28683, v28684, v28685, v28686, v28687, v28688, v28689, v28690, v28691, v28692, v28694, or v28995.
[0377] A28. The antibody construct according to embodiment A27, comprising a VH sequence and a VL sequence having at least 85% sequence identity to the VH and VL sequences of any one of variants v28726, v28727, v28728, v28730, v20022, v28700, v28704, v28705, v28706, v28711, v28712, v28713, v20036, v28696, v28697, v28698, v28701, v28702, v28703, v28707, v20023, v28683, v28684, v28685, v28686, v28687, v28688, v28689, v28690, v28691, v28692, v28694, or v28995.
[0378] A29. The antibody construct according to any one of embodiments A1 to A28, conjugated to a drug.
[0379] A30, A pharmaceutical composition comprising the antibody construct of any one of embodiments A1 to A29.
[0380] A31. One or more nucleic acids encoding the antibody construct according to any one of embodiments A1 to A28.
[0381] A32. One or more vectors comprising the one or more nucleic acids according to embodiment A31.
[0382] A33, An isolated cell comprising the one or more nucleic acid according to embodiment A31, or the one or more vectors according to embodiment A32.
[0383] A34. A method of preparing the antibody construct according to any one of embodiments A1 to A29, comprising culturing the isolated cell of embodiment A33 under conditions suitable for expressing the antibody construct, and purifying the antibody construct.
[0384] A35. A method of treating a subject having a cancer, comprising administering to the subject an effective amount of the antibody construct according to any one of embodiments A1 to A29.
[0385] A36, Use of an effective amount of the antibody construct according to any one of embodiments A1 to A29 for the treatment of cancer in a subject in need thereof.
[0386] A37. Use of the antibody construct according to any one of embodiments A1 to A29 in the preparation of a medicament for the treatment of cancer.
[0387] A38. The antibody construct according to any one of embodiments A1 to A29, for use in the treatment of cancer in a subject.
[0388] B1. An antibody construct comprising:

[0389] a) a first 4-1BB-binding domain that binds to a 4-1BB extracellular domain (4-1BB ECD), and
[0390] b) a first tumor-associated antigen (TAA) antigen binding domain (TAA antigen-binding domain) that binds to a TAA,
   wherein the first 4-MB-binding domain and the first TAA antigen-binding domain are linked directly or indirectly to a scaffold.
[0391] B2. The antibody construct according to embodiment B1, wherein the first 4-1BB binding domain is a first 4-1BB antigen-binding domain.
[0392] B3. The construct according to embodiment B1 or B2, wherein the first 4-1BB antigen-binding domain is derived from an agonistic anti-4-1BB antibody.
[0393] B4. The construct according to any one of embodiments B 1 to B3, wherein:
   [0394] a) the first 4-1BB antigen-binding domain in monovalent form has an KD for human 4-1BB between about 1 μM and 100 pM; and/or
   [0395] b) the 4-1BB×TAA antibody construct binds to one or more TAA-expressing cell lines as determined by flow cytometry; and/or
   [0396] c) the 4-1BB×TAA antibody construct binds to human 4-1BB as measured by SPR and binds to the TAA as measured by SPR; and/or
   [0397] d) the 4-1BB×TAA antibody construct stimulates 4-1BB activity in I cells as measured by cytokine production, in the presence of TAA expressing cells; and/or
   [0398] e) the 4-1BB×TAA antibody construct binds to 4-1BB-expressing cells and binds to TAA-expressing cells as measured by flow cytometry; and/or
   [0399] f) the 4-1BB×TAA antibody constructs are capable of stimulating 4-1BB signalling in 4-1BB-expressing cells in the presence of TAA-expressing cells.
[0400] B5, The antibody construct according to any one of embodiments B1 to B4, wherein the first 4-1BB antigen-binding domain comprises: a) a heavy chain variable domain comprising the three heavy chain CDRs of antibody 1C3, and a light chain variable domain comprising the three light chain CDRs of antibody 1C3; b) a heavy chain variable domain comprising the three heavy chain CDRs of antibody 1C8, and a light chain variable domain comprising the three light chain CDRs of antibody 1C8; c) a heavy chain variable domain comprising the three heavy chain CDRs of antibody 1G1, and a light chain variable domain comprising the three light chain CDRs of antibody 1G1; d) a heavy chain variable domain comprising the three heavy chain CDRs of antibody 2E8, and a light chain variable domain comprising the three light chain CDRs of antibody 2E8; e) a heavy chain variable domain comprising the three heavy chain CDRs of antibody 3E7, and a light chain variable domain comprising the three light chain CDRs of antibody 3E7; f) a heavy chain variable domain comprising the three heavy chain CDRs of antibody 4E6, and a light chain variable domain comprising the three light chain CDRs of antibody 4E6; g) a heavy chain variable domain comprising the three heavy chain CDRs of antibody 5G8, and a light chain variable domain comprising the three light chain CDRs of antibody 5G8; or h) a heavy chain variable domain comprising the three heavy chain CDRs of antibody 6B3, and a light chain variable domain comprising the three light chain CDRs of antibody 6B3.
[0401] B6. The antibody construct according to any one of embodiments B 1 to B5, wherein the first 4-1BB antigen-binding domain is a human or humanized antigen-binding domain.
[0402] B7. The antibody construct according to embodiment B6, wherein the first 4-1BB antigen-binding domain comprises:
[0403] a) a heavy chain variable domain (VH) sequence that is at least 85% identical to the VH sequence of v28726 and a light chain variable domain (VL) sequence that is at least 85% identical to the VL sequence of v28726;
[0404] b) a heavy chain variable domain (VH) sequence that is at least 85% identical to the VH sequence of v28727 and a light chain variable domain (VL) sequence that is at least 85% identical to the VL sequence of v28727;
[0405] c) a heavy chain variable domain (VH) sequence that is at least 85% identical to the VH sequence of v28728 and a light chain variable domain (VL) sequence that is at least 85% identical to the VL sequence of v28728;
[0406] d) a heavy chain variable domain (VH) sequence that is at least 85% identical to the VH sequence of v28730 and a light chain variable domain (VL) sequence that is at least 85% identical to the VL sequence of v28730;
[0407] e) a heavy chain variable domain (VH) sequence that is at least 85% identical to the VH sequence of v28700 and a light chain variable domain (VL) sequence that is at least 85% identical to the VL sequence of v28700;
[0408] f) a heavy chain variable domain (VH) sequence that is at least 85% identical to the VH sequence of v28704 and a light chain variable domain (VL) sequence that is at least 85% identical to the VL sequence of v28704;
[0409] g) a heavy chain variable domain (VH) sequence that is at least 85% identical to the VH sequence of v28705 and a light chain variable domain (VL) sequence that is at least 85% identical to the VL sequence of v28705;
[0410] h) a heavy chain variable domain (VH) sequence that is at least 85% identical to the VH sequence of v28706 and a light chain variable domain (VL) sequence that is at least 85% identical to the VL sequence of v28706;
[0411] i) a heavy chain variable domain (VH) sequence that is at least 85% identical to the VH sequence of v28711 and a light chain variable domain (VL) sequence that is at least 8590 identical to the VL sequence of v28711;
[0412] j) a heavy chain variable domain (VH) sequence that is at least 85% identical to the VH sequence of v28712 and a light chain variable domain (VL) sequence that is at least 85% identical to the VL sequence of v28712;
[0413] k) a heavy chain variable domain (VH) sequence that is at least 85% identical to the VH sequence of v28713 and a light chain variable domain (VL) sequence that is at least 85% identical to the VL sequence of v28713;
[0414] l) a heavy chain variable domain (VH) sequence that is at least 85% identical to the VH sequence of v28696 and a light chain variable domain (VL) sequence that is at least 85% identical to the VL sequence of v28696;
[0415] m) a heavy chain variable domain (VH) sequence that is at least 85% identical to the VH sequence of v28697 and a light chain variable domain (VL) sequence that is at least 85% identical to the VL sequence of v28697;
[0416] n) a heavy chain variable domain (VH) sequence that is at least 85% identical to the VH sequence of v28698 and a light chain variable domain (VL) sequence that is at least 85% identical to the VI: sequence of v28698;
[0417] o) a heavy chain variable domain (VH) sequence that is at least 85% identical to the VH sequence of v28701 and a light chain variable domain (VL) sequence that is at least 85% identical to the VL sequence of v28701;
[0418] p) a heavy chain variable domain (VH) sequence that is at least 85% identical to the VH sequence of v28702 and a light chain variable domain (VL) sequence that is at least 85% identical to the VL sequence of v28702;
[0419] q) a heavy chain variable domain (VH) sequence that is at least 85% identical to the VH sequence of v28703 and a light chain variable domain (VL) sequence that is at least 85% identical to the VL sequence of v28703;
[0420] r) a heavy chain variable domain (VH) sequence that is at least 85% identical to the VH sequence of v28707 and a light chain variable domain (VL) sequence that is at least 85% identical to the VL sequence of v28707;
[0421] s) a heavy chain variable domain (VH) sequence that is at least 85% identical to the VH sequence of v28683 and a light chain variable domain (VL) sequence that is at least 85% identical to the VL sequence of v28683;
[0422] t) a heavy chain variable domain (VH) sequence that is at least 85% identical to the VH sequence of v28684 and a light chain variable domain (VL) sequence that is at least 85% identical to the VL sequence of v28684;
[0423] u) a heavy chain variable domain (VH) sequence that is at least 85% identical to the VH sequence of v28685 and a light chain variable domain (VL) sequence that is at least 85% identical to the VL sequence of v28685;
[0424] v) a heavy chain variable domain (VH) sequence that is at least 85% identical to the VH sequence of v28686 and a light chain variable domain (VL) sequence that is at least 85% identical to the VL sequence of v28686;
[0425] w) a heavy chain variable domain (VH) sequence that is at least 85% identical to the VH sequence of v28687 and a light chain variable domain (VL) sequence that is at least 85% identical to the VL sequence of v28687;
[0426] x) a heavy chain variable domain (VH) sequence that is at least 85% identical to the VH sequence of v28688 and a light chain variable domain (VL) sequence that is at least 85% identical to the VL sequence of v28688;
[0427] y) a heavy chain variable domain (VH) sequence that is at least 85% identical to the VH sequence of v28689 and a light chain variable domain (VL) sequence that is at least 85% identical to the VL sequence of v28689;
[0428] z) a heavy chain variable domain (VH) sequence that is at least 85% identical to the VH sequence of v2869( )and a light chain variable domain (VL) sequence that is at least 85% identical to the VL sequence of v28690;
[0429] aa) a heavy chain variable domain (VH) sequence that is at least 85% identical to the VH sequence of v28691 and a light chain variable domain (VL) sequence that is at least 85% identical to the VL sequence of v28691;
[0430] ab) a heavy chain variable domain (VH) sequence that is at least 85% identical to the VH sequence of v28692 and a light chain variable domain (VL) sequence that is at least 85% identical to the VL sequence of v28692;
[0431] ac) a heavy chain variable domain (VH) sequence that is at least 85% identical to the VH sequence of v28694 and a light chain variable domain (VL) sequence that is at least 85% identical to the VL sequence of v28694; or
[0432] ad) a heavy chain variable domain (VH) sequence that is at least 85% identical to the VH sequence of v28695 and a light chain variable domain (VL) sequence that is at least 85% identical to the VL sequence of v28695.
[0433] B8. The antibody construct according to any one of embodiments B1 to B7, further comprising a second 4-1BB binding domain.
[0434] B9. The antibody construct according to any one of embodiments B1 to B8, wherein the second 4-1BB binding domain is a second 4-1BB antigen-binding domain.
[0435] B10. The antibody construct according to embodiment B9, wherein the second 4-1BB antigen-binding domain is the same as the first 4-1BB antigen-binding domain.
[0436] B11. The antibody construct according to embodiment B10, wherein the first 4-1BB antigen-binding domain and/or the second 4-1BB antigen-binding domain are in a Fab format.

[0437] B12. The antibody construct according to any one of embodiments B1 to B11, wherein the TAA antigen-binding domain is a folate receptor-α (FRα) antigen-binding domain, a Solute Carrier Family 34 Member 2 (NaPi2b) antigen-binding domain, a HER2 antigen-binding domain, a mesothelin antigen-binding domain, or a Solute Carrier Family 39 Member 6 (LIV-1) antigen-binding domain.
[0438] B13. The antibody construct according to any one of embodiments B1 to B12, wherein the antibody construct comprises a second TAA antigen-binding domain.
[0439] B14. The antibody construct according to embodiment B13, wherein the first and second TAA antigen-binding domain bind to the same TAA.
[0440] B15. The antibody construct according to any one of embodiments B1 to B14, wherein the first TAA antigen-binding domain is a FRα antigen-binding domain.
[0441] B16. The antibody construct according to embodiment B15, wherein the FRα antigen-binding domain comprises: a) a heavy chain variable domain comprising the three heavy chain CDR.s of antibody 8K22, and a light chain variable domain comprising the three light chain CDRs of antibody 8K22; or b) heavy chain variable domain comprising the three heavy chain CDRs of antibody 1H06, and a light chain variable domain comprising the three light chain CDRs of antibody 1H06.
[0442] B17. The antibody construct according to embodiment B16, wherein the FRα antigen-binding domain is a human or humanized antigen-binding domain.
[0443] B18. The antibody construct according to embodiment B17, wherein the FRα antigen-binding domain comprises:
[0444] a) a heavy chain variable domain (VH) sequence that is at least 85% identical to the VH sequence of v23794 and a light chain variable domain (VL) sequence that is at least 85% identical to the VI.: sequence of v23794;
[0445] b) a heavy chain variable domain (VH) sequence that is at least 85% identical to the VH sequence of v23795 and a light chain variable domain (VL) sequence that is at least 85% identical to the VL sequence of v23795;
[0446] c) a heavy chain variable domain (VH) sequence that is at least 85% identical to the VH sequence of v23796 and a light chain variable domain (VL) sequence that is at least 85% identical to the VL sequence of v23796;
[0447] d) a heavy chain variable domain (VH) sequence that is at least 85% identical to the VET sequence of v23797 and a light chain variable domain (VL) sequence that is at least 85% identical to the VL sequence of v23797;
[0448] e) a heavy chain variable domain (VH) sequence that is at least 85% identical to the VH sequence of v23798 and a light chain variable domain (VL) sequence that is at least 85% identical to the VL sequence of v23798;
[0449] f) a heavy chain variable domain (VH) sequence that is at least 85% identical to the VH sequence of v23799 and a light chain variable domain (VL) sequence that is at least 85% identical to the VL sequence of v23799;
[0450] g) a heavy chain variable domain (VH) sequence that is at least 85% identical to the VH sequence of v23800 and a light chain variable domain (VL) sequence that is at least 85% identical to the VL sequence of v23800;
[0451] h) a heavy chain variable domain (VH) sequence that is at least 85% identical to the sequence of v23801 and a light chain variable domain (VL) sequence that is at least 85% identical to the VL sequence of v23801;
[0452] i) a heavy chain variable domain (VH) sequence that is at least 85% identical to the VH sequence of v23802 and a light chain variable domain (VL) sequence that is at least 85% identical to the VL sequence of v23802;
[0453] j) a heavy chain variable domain (VH) sequence that is at least 85% identical to the VH sequence of v23803 and a light chain variable domain (VL) sequence that is at least 85% identical to the VL sequence of v23803;
[0454] k) a heavy chain variable domain (VH) sequence that is at least 85% identical to the sequence of v23804 and a light chain variable domain (VL) sequence that is at least 85% identical to the VL sequence of v23804;
[0455] l) a heavy chain variable domain (VH) sequence that is at least 85% identical to the VH sequence of v23805 and a light chain variable domain (VL) sequence that is at least 85% identical to the VL sequence of v23805;
[0456] m) a heavy chain variable domain (VH) sequence that is at least 85% identical to the VH sequence of v23806 and a light chain variable domain (VL) sequence that is at least 85% identical to the VL sequence of v23806;
[0457] n) a heavy chain variable domain (VH) sequence that is at least 85% identical to the VH sequence of v23807 and a light chain variable domain (VL) sequence that is at least 85% identical to the VL sequence of v23807;
[0458] o) a heavy chain variable domain (VH) sequence that is at least 85% identical to the VH sequence of v23808 and a light chain variable domain (VL) sequence that is at least 85% identical to the VL sequence of v23808;
[0459] p) a heavy chain variable domain (VH) sequence that is at least 85% identical to the VH sequence of v23809 and a light chain variable domain (VL) sequence that is at least 85% identical to the VL sequence of v23809;
[0460] q) a heavy chain variable domain (VH) sequence that is at least 85% identical to the VH sequence of v23810 and a light chain variable domain (VL) sequence that is at least 85% identical to the VL sequence of v23810;
[0461] r) a heavy chain variable domain (VH) sequence that is at least 85% identical to the VH sequence of v23811 and a light chain variable domain (VL) sequence that is at least 85% identical to the VL sequence of v23811;
[0462] s) a heavy chain variable domain (VH) sequence that is at least 85% identical to the VH sequence of v23812 and a light chain variable domain (VL) sequence that is at least 85% identical to the VL sequence of v23812;
[0463] t) a heavy chain variable domain (VH) sequence that is at least 85% identical to the VH sequence of v23813 and a light chain variable domain (VL) sequence that is at least 85% identical to the VL sequence of v23813;
[0464] u) a heavy chain variable domain (VH) sequence that is at least 85% identical to the VH sequence of v23814 and a light chain variable domain (VL) sequence that is at least 85% identical to the VI: sequence of v23814;
[0465] v) a heavy chain variable domain (VH) sequence that is at least 85% identical to the VH sequence of v23815 and a light chain variable domain (VL) sequence that is at least 85% identical to the VL sequence of v23815;
[0466] w) a heavy chain variable domain (VH) sequence that is at least 85% identical to the VH sequence of v23816 and a light chain variable domain (VL) sequence that is at least 85% identical to the VL sequence of v23816;
[0467] x) a heavy chain variable domain (VH) sequence that is at least 85% identical to the VH. sequence of v23817 and a light chain variable domain (VL) sequence that is at least 85% identical to the VL sequence of v23817; or
[0468] y) a heavy chain variable domain (VH) sequence that is at least 85% identical to the VH sequence of v23818 and a light chain variable domain (VL) sequence that is at least 85% identical to the VL sequence of v23818.
[0469] B19. The antibody construct according to any one of embodiments B1 to B18, wherein the TAA antigen-binding domain is in an scFv format.
[0470] B20. The antibody construct according to any one of embodiments B1 to 1318, wherein the TAA antigen-binding, domain is in a Fab format.

[0471] B21. The antibody construct according to any one of embodiments B1 to B20, wherein the scaffold is a dimeric Fc: construct having a first Fc polypeptide and a second. Fc polypeptide, each F′e, polypeptide comprising a CH3 sequence, or wherein the scaffold is a linker or an albumin polypeptide.

[0472] B22. The antibody construct according to embodiment B21, wherein the scaffold is a heterodimeric Fc construct having a first Fc polypeptide that is different from the second Fc polypeptide, and wherein the CH3 sequences of the first Fc polypeptide and the second Fc poly peptide comprise amino acid substitutions that promote the formation of a heterodimeric Fc.

[0473] B23. The antibody construct according to embodiment B22, wherein:
[0474] a) one Fc polypeptide comprises the amino acid substitutions T350V_L351Y_F405A_Y407V and the other Fc polypeptide comprises the amino acid substitutions 17350V_T366L_K392L_T394W;
[0475] b) one Fc polypeptide comprises the amino acid substitutions T350V_T366L_K392M_T394W and the other Fc polypeptide comprises the amino acid substitutions T350V_L351Y_F405A_Y407V;
[0476] c) one Fc polypeptide comprises the amino acid substitutions L351Y_F405A_Y407V and the other Fc polypeptide comprises the amino acid substitutions T366L_K392M_T394W;
[0477] d) one Fc polypeptide comprises the amino acid substitutions L351Y_F405A_Y407V and the other Fc polypeptide comprises the amino acid substitutions T366L_ K392L_T394W; or
[0478] e) one Fc polypeptide comprises the amino acid substitutions L351Y_S400E_F405A_Y407V and the other Fc polypeptide comprises the amino acid substitutions T366O_N390R_K392M_T394W,
   wherein the numbering of residues is according to the EU numbering system,
[0479] B24. The antibody construct according to any one of embodiments B21 or B23, further comprising one or more amino acid modifications that reduce effector function,
[0480] B25. The antibody construct according to embodiment B24, wherein the one or more amino acid modifications are L. 234A, L235A and D265S, wherein the numbering of residues is according to the EU numbering system.
[0481] B26. The antibody construct according to any one of embodiments B1 to B25, wherein the first 4-1BB antigen-binding domain is linked to the N terminus of the first Fc polypeptide, and the first TAA antigen-binding domain is linked to the C terminus of the first Fc polypeptide.
[0482] B27. The antibody construct according to any one of embodiments B1 to B25, wherein the first 4-1BB antigen-binding, domain is linked to the N terminus of the first Fc polypeptide, and the first TAA antigen-binding domain is linked to the C terminus of the second Fc polypeptide
[0483] B28. The antibody construct according to embodiment B26 or B27, further comprising a second 4-1BB antigen-binding domain linked to the N terminus of the second Fc polypeptide.
[0484] B29. The antibody construct according to any one of embodiments B1 to B25, comprising a first 4-1BB antigen-binding domain linked to the N terminus of the first Fc polypeptide, a second 4-1BB antigen-binding domain linked to the N terminus of the second Fc polypeptide, a first TAA antigen-binding domain linked to the C terminus of the first Fc polypeptide and a second TAA antigen-binding domain linked to the C terminus of the second Fc polypeptide.
[0485] B30. The antibody construct according to any one of embodiments B1 to B25, comprising a first 4-1BB antigen-binding domain linked to the N terminus of the first Fc polypeptide or to the N terminus of the second Fc polypeptide, a first TAA antigen-binding domain linked to the C terminus of the first Fc polypeptide and a second TAA antigen-binding domain linked to the C terminus of the second Fc polypeptide.
[0486] B31. The antibody construct according to any one of embodiments B1 to B30, wherein the first and or second 4-1BB antigen-binding domain comprises a heavy chain variable domain comprising the three heavy chain CDRs of antibody 1G1, and a light chain variable domain comprising the three light chain CDRs of antibody 1G1, and the first and/or second Frα antigen-binding domain comprises a heavy chain variable domain comprising the three heavy chain CDRs of antibody 8K22, and a light chain variable domain comprising the three light chain CDRs of antibody 8K22.
[0487] B32. The antibody construct according to embodiment B31, wherein the first and second 4-1BB antigen-binding domain comprises a heavy chain variable domain (VH) sequence that is at least 85% identical to the VH sequence of v28614 and a light chain variable domain (VL) sequence that is at least 85% identical to the VL sequence of v28614, and the first and/or second FRα antigen-binding domain comprises a heavy chain variable domain (VH) sequence that is at least 85% identical to the VH sequence of v23807 and a light chain variable domain (VL) sequence that is at least 85% identical to the VL sequence of v23807.
[0488] B33. The antibody construct according to embodiment B32, comprising a first heavy chain polypeptide sequence as set forth in SEQ ID NO:353, a second heavy chain polypeptide sequence as set forth in SEQ ID NO:349, and a light chain polypeptide sequence as set forth in SEQ NO:346.
[0489] B34. The antibody construct according to any one of embodiments B1 to B33, conjugated to a drug.
[0490] B35. A pharmaceutical composition comprising the antibody construct of any one of embodiments B1 to B33.
[0491] B36. One or more nucleic acids encoding the antibody construct according to any one of embodiments B1 to B34.
[0492] B37, One or more vectors comprising the one or more nucleic acids according to embodiment B36.
[0493] B38. An isolated cell comprising the one or more nucleic acid according to embodiment B36, or the one or more vectors according to embodiment B37,
[0494] B39. A method of preparing the antibody construct according to any one of embodiments B1 to B34, comprising culturing the isolated cell of embodiment B38 under conditions suitable for expressing the antibody construct, and purifying the antibody construct.
[0495] B40. A method of treating a subject having a cancer, comprising administering to the subject an effective amount of the antibody construct according to any one of embodiments B1 to B34.
[0496] B41. Use of an effective amount of the antibody construct according to any one of embodiments B1 to B34 for the treatment of cancer in a subject in need thereof.
[0497] B42. Use of the antibody construct according to any one of embodiments B1 to B34 in the preparation of a medicament for the treatment of cancer.

[0498] B43. The antibody construct according to any one of embodiments B1 to B34, for use in the treatment of cancer in a subject.
[0499] C1. An antibody construct or antigen-binding fragment thereof, that specifically binds to 4-1BB, comprising: a heavy chain variable sequence comprising three heavy chain CDRs and a light chain variable sequence comprising three light chain CDRs, wherein the heavy chain CDRs and the light chain CDRs are from any one of antibodies 1G1, 1B2, 1C3, 1C8, 2A7, 2E8, 2H9, 3D7, 3H1, 3E7, 3G4, 4B11, 4E6, 4F9, 4G10, 5E2, 5G8, or 6B3.
[0500] C2. The antibody construct according to embodiment C1, wherein the antibody construct agonizes 4-1BB.
[0501] C3. The antibody construct according to embodiment C2, comprising a heavy chain variable (VH) sequence comprising three CDRs and a light chain variable (VL) sequence comprising three CDRs, wherein the heavy chain CDRs and the light chain CDRs are from any one of antibodies 1G1, 1C3, 1C8, 2E8, 3E7, 4E6, 5G8, or 6B3.
[0502] C4. The antibody construct according to any one of embodiments C1 to C3, wherein the antibody or antigen-binding fragment is or comprises a humanized antibody.
[0503] C5. The antibody construct according to embodiment C1 or C2, comprising a VH sequence and a VL sequence having at least 85% sequence identity to the VH and VL sequences of any one of variants v28726, v28727, v28728, v28730, v28700, v28704, v28705, v28706, v28711, v28712, v28713, v28696, v28697, v28698, v28701, v28702, v28703, v28707, v28683, v28684, v28685, v28686, v28687, v28688, v28689, v28690, v28691, v28692, v28694, or v28695.
[0504] C6. The antibody construct according to any one of embodiments C1 to C5, wherein the antibody or antigen-binding fragment has a binding affinity (K_{D}) for a human 4-1BB molecule of about 10 nM to about 500 nM.
[0505] C7. The antibody construct according to any one of embodiments C1 to C6, wherein the antibody or antigen-binding fragment binds to an epitope within the extracellular domain of human 4-1BB polypeptide.
[0506] C8. The antibody construct according to any one of embodiments C1 to C7, wherein the antibody construct includes immunoglobulin constant domains, wherein the constant domains are from an IgG1 or a variant thereof, an IgG2 or a variant thereof, an IgG4 or a variant thereof, an IgA or a variant thereof, an IgE or a variant thereof, an IgM or a variant thereof, or an IgD or a variant thereof.
[0507] C9. The antibody construct according to any one of embodiments C1 to C8, wherein the antibody is or comprises a human IgG1.
[0508] C10. The antibody construct according to any one of embodiments C1 to C9, wherein the antibody or antigen-binding fragment is a monoclonal antibody.
[0509] C11.The antibody construct according to any one of embodiments C1 to C7, wherein the antibody fragment is a Fab fragment, a Fab′ fragment, a F(ab′)2 fragment, a Fv fragment, a scFv fragment, a single domain antibody, or a diabody.
[0510] C12. The antibody construct according to any one of embodiments C1 to C11, conjugated to a drug.
[0511] C13. A pharmaceutical composition comprising the antibody construct of any one of embodiments C1 to C12.
[0512] C14. One or more nucleic acids encoding the antibody construct according to any one of embodiments C1 to C11.
[0513] C15. One or more vectors comprising the one or more nucleic acids according to embodiment C14.
[0514] C16. An isolated cell comprising the one or more nucleic acids according to embodiment C14, or the one or more vectors according to embodiment C15.
[0515] C17. A method of preparing the antibody construct according to any one of embodiments C1 to C12, comprising culturing the isolated cell of embodiment C16 under conditions suitable for expressing the antibody construct, and purifying the antibody construct.
[0516] C18. A method of treating a subject having a cancer, comprising administering to the subject an effective amount of the antibody construct according to any one of embodiments C1 to C12.
[0517] C19. Use of an effective amount of the antibody construct according to any one of embodiments C1 to C12 for the treatment of cancer in a subject in need thereof.
[0518] C20. Use of the antibody construct according to any one of embodiments C1 to C12 in the preparation of a medicament for the treatment of cancer.
[0519] C21. The antibody construct according to any one of embodiments C1 to C12, for use in the treatment of cancer in a subject.
[0520] D1. An antibody construct or antigen-binding fragment thereof, that specifically binds to FRα, comprising: a heavy chain variable (VH) sequence comprising three CDRs and a light chain variable (VL) sequence comprising three CDRs, wherein the heavy chain CDRs and the light chain CDRs are from antibody 8K22 or 1H06.
[0521] D2. The anti-FRα antibody or antigen-binding fragment according to embodiment D1, wherein the antibody or antigen-binding fragment thereof is or comprises a humanized antibody.
[0522] D3. The anti-Frα antibody or antigen-binding fragment according to embodiment D1 or D2, comprising a VH sequence and a VL sequence having at least 85% sequence identity to the VH and VL sequences of any one of variants 23794, 23795, 23796, 23797, 23798, 23799, 23800, 23801, 23802, 23803, 23804, 23805, 23806, 23807, 23808, 23809, 23810, 23811, 23812, 23813, 23814, 23815, 23816, 23817, or 23818.
[0523] D4. The anti-FRα antibody or antigen-binding fragment according to embodiment D1 or D2, comprising a VH sequence having at least 85% sequence identity to the VH sequence as set forth in SEQ ID NO:300 and a VL sequence having at least 85% sequence identity to the VL sequence as set forth in SEQ ID NO:301.
[0524] D5. The anti-FRα antibody or antigen-binding fragment according to any one of embodiments D1 to D4, wherein the antibody or antigen-binding fragment has a binding affinity (K_{D}) fora human FRα molecule of between about 100 pM to about 100 nM.
[0525] D6. The anti-FRα antibody or antigen-binding fragment according to any one of embodiments D1 to D5, wherein the antibody includes an immunoglobulin constant domain, wherein the constant domain is selected from an IgG1 or a variant thereof, an IgG2 or a variant thereof, an IgG4 or a variant thereof, an IgA or a variant thereof, an IgE or a variant thereof, an IgM or a variant thereof, and an IgD or a variant thereof.
[0526] D7. The anti-FRα antibody or antigen-binding fragment according to any one of embodiments D1 to D6, wherein the antibody is or comprises a human IgG1.

[0527] D8. The anti-FRα antibody or antigen-binding fragment according to any one of embodiments D1 to D7, wherein the antibody or antigen-binding fragment is a monoclonal antibody.
[0528] D9. The anti-FRα antibody or antigen-binding fragment according to any one of embodiments D1 to D8, wherein the antibody fragment is a Fab fragment, a Fab′ fragment, a F(ab′)2 fragment, a Fv fragment, a scFv fragment, a single domain antibody, or a diabody.
[0529] D10. The antibody construct according to any one of embodiments D1 to D9, conjugated to a drug.
[0530] D11. A pharmaceutical composition comprising the antibody construct of any one of embodiments D1 to D10.
[0531] D12. One or more nucleic acids encoding the antibody construct according to any one of embodiments D1 to D9.
[0532] D13, One or more vectors comprising the one or more nucleic acids according to embodiment D12.
[0533] D14. An isolated cell comprising the one or more nucleic acids according to embodiment D12, or the one or more vectors according to embodiment D13.
[0534] D15. A method of preparing the antibody construct according to any one of embodiments D1 to D10, comprising culturing the isolated cell of embodiment D14 under conditions suitable for expressing the antibody construct, and purifying the antibody construct.
[0535] D16. A method of treating a subject having a cancer, comprising administering to the subject an effective amount of the antibody construct according to any one of embodiments D1 to D10.
[0536] D17. Use of an effective amount of the antibody construct according to any one of embodiments D1 to D10 for the treatment of cancer in a subject in need thereof.
[0537] D18. Use of the antibody construct according to any one of embodiments D1 to D10 in the preparation of a medicament for the treatment of cancer.
[0538] D19. The antibody construct according to any one of embodiments D1 to D10, for use in the treatment of cancer in a subject.

### EXAMPLES

[0539] Below are examples of specific embodiments related to the antibody constructs described herein. The examples are offered for illustrative purposes only, and are not intended to limit the scope of the disclosure in any way. Efforts have been made to ensure accuracy with respect to numbers used (e.g., amounts, temperatures, etc.), but some experimental error and deviation should, of course, be allowed for.

[0540] The practice of the present invention will employ, unless otherwise indicated, conventional methods of protein chemistry, biochemistry, recombinant DNA techniques and pharmacology, within the skill of the art. Such techniques are explained fully in the literature. See, e.g., T. E. Creighton, Proteins: Structures and Molecular Properties (W.H. Freeman and Company, 1993); A. L. Lehninger, Biochemistry (Worth Publishers. Inc., current addition); Sambrook, et al., Molecular Cloning: A Laboratory Manual (2nd Edition, 1989); Methods In Enzymology (S. Colowick and N. Kaplan eds., Academic Press, Inc); Remington's Pharmaceutical Sciences, 18th Edition (Easton, Pa.: Mack Publishing Company, 1990); Carey and Sundberg Advanced Organic Chemistry 3^{rd} Ed. (Plenum Press) Vols A and B (1992).

### Example 1

### Design and Preparation of Exemplary 4-1BB×HER2 Bispecific Antibody Constructs

[0541] A number of exemplary bispecific antibody constructs (or bispecific antibodies) targeting 4-1BB and the TAA HER2, as well as controls were constructed as described below. The antibodies and controls were prepared in different exemplary formats, as described in FIG. 2. These antibody constructs were prepared in order to allow examination of the potential for conditional agonist of 4-1BB, and the optimal format for activity of the 4-1BB×HER2 constructs.

### Design of Exemplary Bispecific Antibody Constructs Targeting 4-1BB and HER2

[0542] Bispecific antibody constructs were prepared in a format in which the HER2 antigen-binding domain was an scFv and the 4-1BB antigen-binding domain was a Fab. Constructs, including controls, comprised an IgGI Fc, unless otherwise indicated (see Table 1). These bispecific antibody constructs comprised a human IgG1 heterodimeric Fc having sets of CH3 domain amino acid substitutions promoting the formation of a heterodimeric Fc These sets of amino acid substitutions are referred to herein as Het FcA (having the amino acid substitutions T350V/L351Y/F405A/Y407V) and Het FcB having the amino acid substitutions T350VIT366L/K392L/T394W). Variants having these sets of amino acid substitutions are referred to in Table 1 as having “Het Fv” modifications. Variants in Table 1 noted as having “FcKO” have the following CH2 amino acid substitutions which knock out FcγR binding: L234A, L235A and D265S. Amino acid residues in the Fc region are identified according to the EU index.

[0543] Bivalent, trivalent and tetravalent antibody constructs were made, all having three polypeptide chains one heavy chain containing Het FcA mutations, a second heavy chain containing Het FcB mutations and a single light chain. The heavy chains were constructed in a series of formats, all of which were comprised of one or two anti-4-1BB antigen-binding domains in the Fab format and a single anti-HER2 antigen-binding domain in the scFv format. These heavy chain formats are described below from N-terminus to C-terminus:

[0544] VL-VH-VH-CH1hinge-CH2-CH3

[0545] VH-CH 1-hinge-CH2-CH3-VL-VH

[0546] VH-CH1-hinge-CH2-CH3

[0547] VL-VH-hinge-CH2-CH3

[0548] Table 1 provides a description of the 4-1BB×HER2 bispecific antibody constructs that were prepared. The number of 4-1BB-targeting domains and HER2-targeting domains are indicated in the “Format” column. For example, in Table 1, 1×1 indicates that the bispecific antibody construct has one 4-1BB binding domain and one HER2 binding domain, 2×1 indicates that the bispecific antibody construct has two 4-1BB binding domains and one HER2 binding domain, etc. The formats of the specific bispecific antibody constructs described below are also represented in FIG. 3.

TABLE 1
Exemplary bispecific antibody constructs targeting 4-1BB and HER2

| | | Format | Fc | |
|---|---|---|---|---|
| Variant | Paratopes | (4-1BB × HER2) | description | Description |
| v16601 | N-terminal trastuzumab scFv, | 1 × 1 | Het Fc, FcKO | 4-1BB × HER2 |
| | monovalent MOR7480.1 4-1BB | | | bispecific antibody |
| | | | | construct |
| v16605 | C-terminal trastuzumab scFv, | 1 × 1 | Het Fc, FcKO | 4-1BB × HER2 |
| | monovalent MOR7480.1 4-1BB | | | bispecific antibody |
| | | | | construct |
| v16675 | N-terminal trastuzumab scFv, | 2 × 1 | Het Fc, FcKO | 4-1BB × HER2 |
| | bivalent MOR7480.1 4-1BB | | | bispecific antibody |
| | | | | construct |
| v16679 | C-terminal trastuzumab scFv, | 2 × 1 | Het Fc, FcKO | 4-1BB × HER2 |
| | bivalent MOR7480.1 4-1BB | | | bispecific antibody |
| | | | | construct |
| v15534 | Trastuzumab scFv, | 1 × 1 | Het Fc | 4-1BB × HER2 |
| | monovalent MOR7480.1 4-1BB | | | bispecific antibody |
| | | | | construct |
| v19353 | Trastuzumab, C-terminal 4-1BB, | 2 × 2 | IgG4 with L234A, | control 4-1BB × |
| | 4-1BB binding domains | | L235A mutations | HER2 bispecific |
| | are anticalins | | | construct (described |
| | | | | in WO2016/177802) |
| v12592 | MOR7840.1, no HER2- | 2 × 0 | Het Fc | control construct, |
| | binding arm | | | monospecific anti- |
| | | | | 4-1BB antibody |
| v13725 | CR8071, negative control | 0 × 0 | HetFc | fully human anti- |
| | antibody | | | influenza HA |
| | | | | antibody |
| v16992 | Pavilizumab, negative control | 0 × 0 | HetFc, FcKO | human anti-RSV |
| | antibody | | | antibody |
| v1040 | trastuzumab, one-armed | 0 × 1 | Het Fc | control HER2- |
| | antibody (Fab format) | | | binding antibody |

[0549] The VH and VL sequences used to construct the 4-1BB antigen-binding domains of the constructs are provided in Table 15, as are the sclFv sequences used to construct HER2 scFv containing constructs. Table X identifies the clones that make up each of the antibody constructs. The polypeptide sequences of each done can be found in Table Y.

### Production of 4-1BB×HER2 Bispecific Antibodies

[0550] To allow the production of bi specific antibodies, heavy chain vectors having a 5′-EcoR1 restriction site signal peptide heavy chain clone terminating at G446 (EU numbering) of CH3-TGA stop-BamH1 cutsite-3′, were ligated into a pTT5 vector to produce heavy chain expression vectors. Light chain vectors, having a 5′-EcoRI cut site-signal peptide-light chain-TGA stop-cutsite-3′, were ligated into a pTT5 vector (Durocher Y et al., Nucl. Acids Res. 2002; 30, No.2 e9) to produce light chain expression vectors. The resulting heavy and light chain expression vectors were sequenced to confirm correct reading frame and sequence of the coding DNA. One of two signal peptides was used, either an artificially designed sequence, MRPTWAWWLFLVLLLALWAPARG [SEQ IU NO:1], Barash S et al., Biochem and Biophys Res. Comm, 2002; 294, 835-842) or the HLA-A signal peptide MAVMAPRTLVLLLSGALALTQTWAG [SEQ ID NO:2].

[0551] The heavy and light chains of variants, were expressed in 200 ml cultures of CHO-3E7 cells. CHO-3E7 cells, at a density of 1.7-2×10⁶ cells/ml, were cultured at 37° C. in FreeStyle™ F17 medium (Thermo Fisher, Watham, Mass.) supplemented with 4 mM glutamine (GE Life Sciences, Marlborough, Mass.) and 0.1% KoliphorP188 (Sigma Aldrich, St. Louis, Mo.). A total volume of 200 ml was transfected with a total of 200 μg DNA (100 μg of variant DNA and 100 μg of CFP/AKT/stuffer DNA) using PEI-max (Polyscience, Philadelphia, Pa.) at a DNA:PEI ratio of 1:4 (W/W), Twenty-four hours after the addition of the DNA-PEI mixture, 0.5 mM valproic acid (final concentration)+1% w/v Tryptone (final concentration)+1× antibiotic/antimycotics (GE Life Sciences, Marlborough, Mass.) were added to the cells which were then transferred to 32° C. and incubated for 7 days prior to harvesting.

[0552] Clarified supernatant samples were incubated in batch with MabSelect™ SuRe™ resin (GE Healthcare, Chicago, Ill.) cleaned with NaOH and equilibrated in DPBS. Resin was poured into cleaned columns, the columns were washed with DPBS and protein eluted with 100 mM sodium citrate buffer pH 3.0. The eluted antibodies were pH adjusted by adding 10% (v/v) 1M HEPES pH 8 to yield a final pH of 6-7. Samples were buffer exchanged into PBS and aseptically filtered. Protein was quantified based on A280 nm (NanoDrop™). Endotoxin levels were determined using the Endosafe® Portable system (Charles River, Wilmington, Mass.). For samples above 0.1 EU/mg, these underwent endotoxin removal with the Proteus NoEndo™ Spin columns (Charles River, Wilmington, Mass.).

[0553] Post protein-A purification, samples were either buffer exchanged into DPBS and aseptically filtered or, depending on their homogeneity assessed by UPLC-SEC, subjected to SEC purification. Samples were loaded onto a Superdex 200 10/30 Increase column (GE Healthcare Life Sciences, Marlborough, Mass.) on an Akta Avant 25 chromatography system (GE Healthcare Life Sciences, Marlborough, Mass.) in DBPS with a flow rate of 0.5 mL/min. Fractions of eluted protein were collected based on A280 nm and the fractions were assessed by non-reducing and reducing High Throughput Protein Express assay using Caliper LabChip GXII (Perkin Elmer, Waltham, Mass.). Procedures were carried out according to HT Protein Express LabChip User Guide version2 LabChip GXII User Manual, with the following modifications. antibody samples, at either 2 μl or 5 μl (concentration range 5-2000 ng/μl), were added to separate wells in 96 well plates (BioRad, Hercules, Calif.) along with 7 μl of HT Protein Express Sample Buffer (Perkin Elmer #760328). Antibody samples were then denatured at 70° C. for 15 mins. The LabChip instrument was operated using the HT Protein Express Chip (Perkin Elmer, Waltham, Mass.) and the Ab-200 assay setting.

[0554] Endotoxin levels were determined by the LAL (limulus amebocyte lysate) assay using the Endosafe® Portable Test System (PTS, Charles River, Wilmington, Mass.). Protein was quantified based on A280 nm (Nanodrop) post protein-A and SEC.

[0555] UPLC-SEC was performed using a Waters Acquity BEH200 SEC column (2.5 mL, 4.6×150 mm, stainless steel, 1.7 μm particles) (Waters LTD, Mississauga, ON) set to 30° C. and mounted on a Waters Acquity UPLC H-Class Bio system with a PDA detector. Run times consisted of 7 min and a total volume per injection of 2.8 mL with a running buffer of DPBS or DPBS with 0.02% Tween 20 pH 7.4 at 0.4 ml/min. Elution was monitored by UV absorbance in the range 210-50 nm, and chromatograms were extracted at 280 nm. Peak integration was performed using Empower 3 software.

### Purity Assessment of Bispecific Antibodies by LC/MS

[0556] The apparent purity of the variants was assessed using mass spectrometry after purification and non-denaturating deglycosylation as described below.

[0557] As the antibody contained Fc N-linked glycans only, the samples were treated with only one enzyme, N-glycosidase F (PNGase-F). The purified samples were de-glycosylated with PINGaseF as follows: 0.1U PINGaseF/μg of antibody in 50 mM Tris-HCl pH 7.0, overnight incubation at 37° C., final protein concentration of 0.48 mg/mL. After deglycosylation, the samples were stored at 4° C. prior to LC-MS analysis.

[0558] The deglycosylated protein samples were analyzed by intact LC-MS using an Agilent 1100 HPLC system coupled to an LTQ-Orbitrap XL mass spectrometer (ThermoFisher , Waltham, Mass.) via an Ion Max electrospray source. The samples (5 μg) were injected onto a 2.1×30 mm Poros R2 reverse phase column (Applied Biosystems) and resolved using the following gradient conditions: 0-3 min: 20% solvent B; 3-6 min: 20-90% solvent B; 6-7 min: 90-20% Solvent B; 7-9 min: 20% solvent B. Solvent A was degassed 0.1% formic acid aq. and solvent B was degassed acetonitrile. The flow rate was 3 mL/mire. The flow was split post-column to direct 100 μL/mL into the electrospray interface. The column was heated to 82.5° C. and solvents were heated pre-column to 80° C. to improve protein peak shape. Prior to analysis, the LTQ-Orbitrap XL was calibrated using ThermoFisher Scientific's LTQ Positive Ion ESI calibration solution (caffeine, MRFA and Ultramark 1621), and tuned for optimal detection of larger proteins (>50 kDa) using a 1 mg/mL solution of lactalbumin. The cone voltage (source fragmentation setting) was approximately 40 V. the FT resolution was 7,500 and the scan range was m/z 400-4,000. The LC-MS system was evaluated for IgG sample analysis using a deglycosylated IgG standard (Waters IgG standard) as well as a deglycosyated antibody standard mix (25:75 half full sized antibody).

[0559] For each LC-MS analysis the mass spectra acquired across the antibody peak (typically 3.6-4.1 minutes) were summed and the entire multiply charged ion envelope (m/z 1,400-4,000) was deconvoluted into a molecular weight profile using the MaxEnt 1 module of MassLynx™, the instrument control and data analysis software (Waters LTD, Missassaugua, ON). Briefly, the raw protein LC-MS data were first opened in QualBrowser, the spectrum viewing module of Xcalibur™ (Thermo Fisher, Waltham, Mass.) and converted to be compatible with Ma.ssLynx™ using Databridge™, a file conversion program provided by Waters. The converted protein spectra were viewed in the Spectrum module of MassLynx™ and deconvoluted using MaxEnt 1. The apparent amount of each antibody species in each sample was determined from their peak heights in the resulting molecular weight profiles. In the majority of cases, the antibodies comprised >95% of the desired construct, with no major glycovariants.

### Example2

### Ability of 4-1BB x HER2 Bispecific Antibody Constructs to Bind to 4-1BB and HER2 as Assessed by Surface Plasmon Resonance (SPR)

[0560] To check the production and characteristics of the 4-1BB×HER2 bispecific antibodies described in Example 1, the ability of these antibodies to bind to human 4-1BB and HER2 was assessed by SPR. 4-1BB×HER2 bispecific variants 16601, 16605, 16675, 16679 were assessed, as well as the control antibody variant 19353 (trastuzumab, having two anticalin domains at the C-termini of both heavy chains that bind to 4-1BB).

### Binding of 4-1BB to Antibodies by SPR

[0561] A surface plasmon resonance (SPR) binding assay for determination of 4-1BB binding affinity to 4-1BB antibody variants was carried out on Biacore™ T200 instrument (GE Healthcare, Mississauga, ON, Canada) with PBS-T (PBS+0.05% (v/v) Tween 20) running buffer (with 0.5 M EDTA stock solution added to 3.0 mM final concentration) at a temperature of 25° C. CMS Series S sensor chip, Biacore™ amine coupling kit (NHS, EDC and 1 M ethanolamine), and 10 mM sodium acetate buffers were all purchased from GE Healthcare. PBS running buffer with 0.05% Tween20 (PBS-71) was purchased from Teknova Inc. (Hollister, Calif.). Goat polyclonal anti-human Fc antibody was purchased from Jackson lmmunoResearch Laboratories Inc. (West Grove, Pa.).

[0562] The SPR binding of antibodies to 4-1BB antigen occurred in two steps: an indirect capture of antibodies onto the anti-human Fc-specific polyclonal antibody surface, followed by the injection of five concentrations of purified human monomeric 4-1BB (SEQ ID NO:70). Monomeric 4-1BB protein was produced by cleaving a 4-1BB-Fc fusion protein (v16730). 4-1BB-Fc was expressed and purified with Protein A in the same manner to antibodies in Example 1 above. The construct was made with a factor Xa cleavage site between the 4-1 BB and the Fc, and with a 10× His tag at the c-term of the Fc.

[0563] v16730 in dPBS was buffer exchanged into Factor Xa cleavage buffer (20 mM Tris, 100 mM NaCl, 2 mM CaCl2 pH 8) using a 5 mL Zeba spin column (ThermoFisher) and cleaved with 0.45% (w/w) of Factor Xa (New England Biolabs, Whitby, ON, Canada) overnight at room temp. The cleavage reaction was stopped by adding 0.372 μM final concentration of 1,5-Dansyl-Glu-Gly-Arg-chloromethyl ketone (Calbiochem, San Diego, Calif., USA) as an inhibitor. Satisfactory cleavage was verified by NR+R SDS−PAGE. The cleavage reaction was mixture was subsequently applied to a 1 mL HiTrap Ni Sepharose Excel (GE Heathcare) column equilibrated in dPBS and the column washed with 5×CV dPBS. The cleaved 41BB protein was collected in the flow-thru fractions. Residual Fc was removed using Protein A purification by applying the protein sample to mAb Select SuRe by gravity. The flow-through was applied to a Superdex 200 10/30 column equilibrated in dPBS. Fractions corresponding to the major 41BB product were collected and used for SPR.

[0564] The anti-human Fc surface was prepared on a CMS Series S sensorchip by standard amine coupling methods as described by the manufacturer (GE Healthcare). Briefly, immediately after EDC/NHS activation, a 25 μg/mL solution of anti-human Fc in 10 mM NaOAc pH 4.5 was injected at a flow rate of 10 μL/min for 420 s until approximately 2000 resonance units (RUs) were immobilized on all four flow cells. The remaining active groups were quenched by a 420 s injection of 1M ethanolamine at 10 μL/min.

[0565] Antibodies for analysis were captured onto the anti-Fc surface by injecting 5 μg/mL solutions at a flow rate of 10 μL/min for 60 s. Using single-cycle kinetics, five concentrations of a two-fold dilution series of 4-1BB starting at 40 nM (for both supernatant and purified antibody runs) with a blank buffer control were sequentially injected at 40 μL/min for 180 s with a 600 s dissociation phase, resulting in a set of sensorgrams with a buffer blank reference. Experiments were performed at a constant temperature of 25° C. The anti-human Fc surfaces were regenerated to prepare for the next injection cycle by one pulse of 10 mM Glycine/HCl pH 1.5 for 120 s at 40 μL/min. Blank-subtracted sensorgrams were analyzed using Biacore™ T200 Evaluation Software v3.0. The blank-subtracted sensorgrams were then fit to the 1:1 Langmuir binding model.

### Binding of HER2 to Antibodies by SPR

[0566] An anti-Fc capture chip was prepared in the same way as above, then antibodies for analysis at 50 μg/ml were injected into the chip at a flow rate of 10 μl/min for 60 s. Using single-cycle kinetics, five concentrations of a two-fold dilution series of HER2 (having recombinant human Her-2 amino acids 23-652; eBioscience) starting at 40nM (for both supernatant and purified antibody runs) with a blank buffer control were sequentially injected at 50 μL/min for 180 s with a 1800 s dissociation phase, resulting in a set of sensorgrams with a buffer blank reference. Experiments were performed at a constant temperature of 25° C. The anti-human Fc surfaces were regenerated to prepare for the next injection cycle by one pulse of 10 mM Glycine/HCl pH 1.5 for 120 s at 40 μL/min. Blank-subtracted sensorgrams were analyzed using Biacore™ T200 Evaluation Software v3.0. The blank-subtracted sensorgrams were then fit to the 1:1 Langmuir binding model to obtain the ka, kd and KD values shown in Table 2 below.

TABLE 2
Ability of bispecific antibody constructs to bind to target

| | HER2 | | | 4-1BB | | |
|---|---|---|---|---|---|---|
| Variant | ka (1/Ms) | kd (1/s) | KD (M) | ka (1/Ms) | kd (1/s) | KD (M) |
| 16601 | 9.44 × 10⁴ | 7.63 × 10⁻⁵ | 8.09 × 10⁻¹⁰ | 5.61 × 10⁵ | 1.15 × 10⁻² | 2.05 × 10⁻⁸ |
| 16605 | 4.18 × 10⁴ | 7.83 × 10⁻⁵ | 1.88 × 10⁻⁹ | 1.03 × 10⁶ | 1.32 × 10⁻² | 1.29 × 10⁻⁸ |
| 16675 | 1.02 × 10⁵ | 8.08 × 10⁻⁵ | 7.91 × 10⁻¹⁰ | 7.89 × 10⁵ | 1.35 × 10⁻² | 1.71 × 10⁻⁸ |
| 16679 | 4.96 × 10⁴ | 6.61 × 10⁻⁵ | 1.33 × 10⁻⁹ | 1.04 × 10⁶ | 1.34 × 10⁻² | 1.30 × 10⁻⁸ |
| 19353 | 1.1 × 10⁵ | 6.76 × 10⁻⁵ | 6.16 × 10⁻¹⁰ | 1.71 × 10⁴ | 6.01 × 10⁻³ | 3.51 × 10⁻⁷ |

[0567] Table 2 shows that the antibodies in different formats are still able to bind to their targets with similar affinity regardless of format. Variants with C-terminal Trastuzumab scFv, v16605 and v16679, showed about a 2-3 fold drop in KD compared to antibodies with N-terminal scFv, but this was judged to be a minor change and not expected to affect function. All 4-1BB antibodies showed similar KD values, with the anti-4-1BB anticalin v19353 showing a lower affinity for 4-1BB compared to the antibodies.

### Example 3

### Ability of 4-1BB×HER2 Bispecific Antibody Constructs to Stimulate 4-1BB Activity in an NF-kB-Luciferase Reporter Assay

[0568] To test the ability of bispecific 4-1BB×:HER2 antibodies to stimulate 4-1BB activity in the presence of a tumor cell expressing HER2, a reporter-gene assay was used as a measure of signaling downstream of 4-1BB to a NF-kB reporter driving luciferase. The 4-1BB×HER2 bispecific antibodies tested included variants 16675, 16679, 15534, 16601, and 16605. Control constructs 19353, 1040, 16992, and 12952 were also tested.

[0569] The ability of bispecific antibodies to activate 4-1BB in the context of HER+ tumour cells was measured using a co-culture assay. This assay used Jurkat cells engineered to express 4-1BB and a luciferase reporter gene driven by an NF-kB site. This assay measures signaling from 4-1BB on the surface of the cell down to the nucleus. Two different tumour lines were used; SKOV3, which express a high level of HER2, and MDA-MB-468 which express a low level of HER2. If the activation of 4-1BB is HER2 dependent, activation should be seen in co-culture with SKOV3 cells and not MDA-MB-468 cells.

[0570] The day prior to the assay white, TC-treated, polystyrene, 384-well plates (Coming) were treated with 40 μL/well of OKT3, mouse-anti-human-CD3 antibody (Biolegend) at 5 μg/mL in phosphate buffered saline (PBS) (Gibco). The plate was sealed to the plate lid by wrapping in parafilm. The plate was incubated overnight at 4° C. The next day, the contents of the plate were aspirated, and the plate was washed with 3 changes of distilled water (120 μL/well) using a 405HT ELISA plate washer (Biotek). The plate was then ready for use in the assay.

[0571] Bispecific antibodies were diluted in Assay Buffer (RPMI (Gibco)/1% FBS (Gibco)) to 400 nM (final assay concentration 100 nM). A volume of 15 μL was pipetted into the well of a 384-well plate treated with OKT3 as above receiving the top concentration of the variant. A volume of 5 μL was pipetted into a volume of 10 μL Assay Buffer in the next well for the second highest concentration well and mixed to give a 3-fold dilution. This was repeated for the transfer from the second highest well to the third highest until the lowest concentration well, where the residual 5 μL volume was removed. 10 μL of either SKOV3 or MDA-MB-468 tumour cells, at a density of 2×10⁶ cells/mL, was then added to give 2×10⁴ cells/well. NFκB luc2P/41 BB Thaw-and-Use Jurkat cells (Promega) were thawed at 37C according to manufacturer's instructions and diluted with 5.8 ML of Assay Buffer. A volume of 20 μL of the reporter cell suspension at approximately 1×10⁶ cells/mL (˜2×10⁴ cells) was added to each well containing the variant/effector-cell mixture.

[0572] The co-cultured cells with variants were then incubated at 37° C. in a 5% CO₂ atmosphere for 5 hours and then equilibrated to room temperature on the benchtop for 10 minutes. A volume of 40 μL of Bio-Glo™ (Promega) luciferase substrate reagent was added to each well of the plate and incubated for 10 minutes at room temperature. The plate was scanned on the Synergy™ H1(Biotek) multi-mode plate reader in luminescence mode. Data was analysed using Prism 7 (GraphPad) and four-parameter variable slope nonlinear fit.

### Results

[0573] All variants having a 4-1BB binding arm induced dose-dependent NF-kB signalling downstream of 4-1BB as measured by production of luciferase in this assay when co-cultured with SKOV-3 cells (FIG. 4A to 4I). In comparison, variants having activity showed lower activity on MDA-MD-468 cells, suggesting that the presence of HER2 on the surface of the SKOV-3 cells induced cross-linking of the antibodies and enhanced 4-1BB signalling. The lowest activation of 4-1BB was seen with the v16601 variant. v16605 and v16675 showed higher activity. v16679 showed highest activity, as determined by greatest potency (EC50) and activity (max RLU). The positive control 4-1BB×HER2 bispecific antibody v19353 showed intermediate potency—higher than v16601 and v16605 but lower than v16675 and v16679. However, v19353 (having a lipocalin 4-1BB binding domain) showed low activity, as given by maximal RLU, compared to the antibody-based 4-1BB agonists. 4-1BB monospecific control variant v12592 showed low activity at lower concentrations, with activity increasing with concentration; however, activity of this antibody was not increased in the presence of SKOV3 cells compared to MDA-MD-468 cells. Control variant v1040 showed no activity in activating 4-1BB, suggesting that there was no direct effect of the HER2 binding arm on the experiment. v16992 similarly showed no effect of a non-binding control antibody. A summary of the results in provided in Table 3.

TABLE 3
Activity of 4-1BB × HER2 bispecific antibody constructs

| Variant | EC₅₀ (pM) | Max activity (RLU) |
|---|---|---|
| v16601 | 2624 | 27917 |
| v16605 | 400.7 | 92032 |
| v16675 | 56.92 | 80946 |
| v16679 | 30.09 | 131190 |
| v19353 | 101.9 | 67157 |
| v15534 | 237.3 | 74426 |

[0574] From this data, it appeared that constructs with two anti-4-1BB binding arms showed greater activity than constructs with one anti-4-1 BB arm. The constructs with a Her2-binding site close to the 4-1BB binding site (eg. v16601 and v16675) appeared less active than the constructs with the Her2 binding site distal from the 4-1BB binding site (eg. v16605 and v16679).

### Example 4

### Primary T Cell-Tumour Co-Culture Assay

[0575] The activity of the 4-1BB×HER2 constructs was also compared using primary T cells in co-culture with tumour cells. To look at activation of cells, and the effects of 4-1BB more broadly, production of cytokines such as IFNγ or IL-2 by T cells was used as a proxy for enhanced T cell activation and function. IL-2. is also a key cytokine produced by T cells after activation which promotes their survival and correlates with activation of T cells. This experiment examined the ability of 4-1BB×HER2 antibodies to enhance the activation of T cells as measured by 1L-2 production, where the T cells have been activated by a sub-optimal amount of anti-CD3 antibody. Bispecific 4-1BB×HER2 antibody variants 16601, 16605, 16675, and 16679, were tested in this example, along with the control variants 1040, 12592, and a human IgG1 negative control. The assay was carried out as described below, using CD4+ T cells.

[0576] Ahead of the experiment, 96 well plates were coated with anti-CD3 by adding 100 μl 1 μg/ml UCHT1 to wells. The plate was then incubated overnight at 4° C. Blood was obtained from healthy donors, centrifuged at 1500 rpm for 5 minutes and plasma discarded. The blood was then diluted in PBS, layered over Ficoll™ and centrifuged at 2000 rpm for 20 minutes at room temperature. The interface layer of PBMC was then taken, washed with PBS to remove platelets, and resuspended. Cells were then counted, diluted to 5×10⁷ cells per ml in PBS 2% FBS 1mM EDTA, and CD4+ T cell enrichment cocktail (Stemcell Technologies) added at 50 μl/ml cells. The cells were then left at room temperature for 10 minutes. EasySeptm™ D magnetic particles (Stemcell Technologies) were then added at 100 μl/ml cells, mixed and left at room temperature for 5 minutes. The cells were then diluted to a volume of 10 ml using PBS/2% FCS/1 mM EDTA and placed into an EasySep™ magnet. Non-selected cells were then decanted, and placed into a fresh tube in an EasySep™ magnet, and those cells decanted into a fresh tube.

[0577] CD4+ T cells were then washed twice in RPMI-1640 10% FCS 1% Penicillin-Streptomycin and diluted to 10⁶ cells/ml and 100 μl added per well to a 96 well plate that had been pre-coated with anti-CD3 (UCHT1). SKBR3 cells were obtained, diluted to 2×10⁵ cells/ml and 50 μl added to wells. Antibody samples were also diluted to 40 nM in RPMI-1640 10% FCS 1% Penicillin-Streptomycin and 50 μl of the resulting solution added per well (10 nM final concentration). In some cases, antibodies were cross-linked using an anti-Fc antibody. The plate was then incubated for three days at 37° C. in a 5% CO₂ atmosphere, and supernatants taken for analysis of IL-2 concentrations by ELISA.

### Results

[0578] Similar to the 4-1BB NF-kB reporter gene assay, the greatest IL-2 production was seen with v16679, with v16675 and v16605 showing equal levels of IL-2 (FIG. 5, left panel). Without SKBR3 cells in the culture, no increase in IL-2 production was seen as a result of any of the 4-1BB bispecifics. v12592 cross-linked by anti-Fc was used as a positive control and represents the level of signaling induced by a fully cross-linked antibody (FIG. 5, right panel). This data indicated that of the variants tested, v16679 (having the format described in FIG. 2B) was able to induce a level of 4-1BB signaling in the T cells in excess of that stimulated by v12592.

### Example 5

### Comparison of Activation of T Cells by v 16679, v19353 and v12592 as Measured by IfN-γ Production

[0579] As v16679 appeared to be the most active 4-1BB×HER2 bispecific in both the reporter-gene assay as well as the primary T cell-tumour co-culture, the ability of this variant to stimulate cytokine production by T cells in co-culture with SKBR3 cells was compared to the positive control constructs v19353 and v12592. In this experiment, IFNγ production was used as a measure of T cell activation as described below.

[0580] 4-1BB×HER2 bispecific antibodies were prepared at 150 nM in assay media (RPMI containing 5% human AB serum with 1% penicillin-streptomycin (Gibco)). 20 μl of diluted antibodies at 150 nM was then added to the top concentration well of a sterile 384-well cell culture plate (Thermo Scientific), and then the antibodies serially diluted 1:3 to generate the lower antibody concentrations.

[0581] SKBR3 tumor cells were cultured in RPMI 10% FCS, treated with 0.05% Trypsin-EDTA (Invitrogen) to remove them from the plate, collected and counted. After centrifugation, the tumor cells were resuspended in assay media at a concentration of 10⁶ cells per ml. 10⁴ tumor cells (10 μl) were added per well according to each condition. Artificial APCs (aAPC/CHO-K1 cells, Promega) were collected using cell dissociation buffer and counted. These cells expressed anti-CD3 (OKT3) and PD-L1 on the surface of the cell and were used to stimulate the T cells in a non-specific manner. After centrifugation, the artificial APC cells were resuspended in assay media at a concentration of 10⁶ cells per ml. T cells were thawed, pelleted, counted and resuspended in assay media at a concentration of 2×10⁶ cells per ml. CD8+ T cells, CD4+ T cells and pan-T cells were purchased from BioIVT, Westbury, N.Y., USA or Stemcell, Vancouver, BC, Canada.

[0582] aAPC/CHO-K1 and CD8+, CD4+ T cells or pan-T cells, each from separate donors, were then mixed in 1:2 ratio and 30 μl of cell mixture added to the 384 well plate along with the 10 μl SKBR3 tumour cells. The plate was then incubated for 37° C. in a 5% CO₂ atmosphere.

[0583] After four days, supernatant was collected to perform Homogenous Time Resolved Fluorescence ELISA (HTRF™). Either 5 μl supernatants, 5 μl serially diluted IFNγ standards or 5 μl PBS were added to wells of a white round-bottom 384 shallow-well plate (Thermo Scientific). Anti-IFNγ-Cryptate antibody (Cisbio, Bedford, Mass.) and anti-IFNγ-XL (Cisbio, Bedford, Mass.) antibody were diluted 20-fold in detection buffer #3 (Cisbio, Bedford, Mass.), and 20 of each diluted antibody mixed with 11 μl PBS per well. 15 μl of this antibody cocktail was added to wells of the 384 well plate alongside the 5 μl experimental supernatant or standards. The plate was then sealed and left overnight at room temperature. The next day, the plate was read at 665 and 620 nm on a Biotek reader and values reported as ratio of 665 nm/62 0nm readings, after correcting for the plate absorption using PBS-only wells. IFNγ concentrations were calculated using the standard curve. GraphPad Prism v7 was used for data analysis, using the non-linear four-parameter model.

### Results

[0584] The results are shown in FIG. 6 with multiple independent CD4 and CD8 T cell donors as well as a single pan-T cell donor. This was done to test if the response was only found in a small number of donors. Across all CD4, CD8 and pan-T cell donors, v16679 showed a dose-dependent increase in IFNγ production by cells in co-culture with SKBR3 cells. v16679 also showed much greater maximal cytokine production and higher potency compared to v19353. v12592 was not active in this experiment, and did not show activity greater than that seen by the negative control v13725, suggesting that v16679 is active in conditions where v12592 is not.

### Example 6

### Generation of Antibodies which Bind 4-1BB and Preparation of Mouse-Human Chimeric Antibodies

[0585] Additional antibodies targeting 4-1BB were generated by ImmunoPrecise (Victoria, Canada) using their proprietary RapidPrime immunization strategy to immunize mice.

[0586] Briefly, Balb/c and NZB/W mice were immunized with human 4-1BB-His protein or a mixture of human 4-1BB-His and mouse 4-1BB-Fc (Acro Biosystems, Newark, Del.), and spleens taken and dissociated to obtain single cells. Splenocytes were then fused with a myeloma paltrier line to create hybridomas. The hybridoma cells were cloned by limiting dilution and the supernatants taken for screening.

[0587] Antibodies binding to human, cynomolgus (Macaca fascicularis) and/or mouse (Mus musculus) 4-1BB were identified by ELISA. 96-well plates were coated by adding 100 λL of a 0.1 μg/ml solution of human, cynomolgus or mouse 4-1BB in carbonate buffer (pH 9.6) overnight at 4° C. The wells were then blocked by using 3% skim milk powder in PBS for 1 hour at room temperature, followed by addition of neat hybridoma supernatant (100 μl/well) at 37° C. for 1 hour with shaking. The antibody was then detected using 1:10000 goat anti-mouse IgG/Ig,M (H+L)-HRP, 100 μl/well in PBS 0.05% Tween-20 for 1 hour at 37° C. with shaking. The presence of HRP in the well was then detected using TMB substrate (50 μl/well) for 3 minutes in the dark, followed by addition of 50 μl 1M HCl to stop the reaction. The plate was then read at 450 nm. Antibodies were also counter-screened to exclude antibodies that bound to TNF superfamily members Ox40 and CD40 and GITR, using the same method.

### Results

[0588] Twenty-four antibodies binding to human 4-1BB were taken forward to be sequenced and further characterized. Some of these antibodies also bound to cynomolgus or mouse 4-1BB.

### Antibody Recovery

[0589] The twenty-four antibodies selected by ELISA were then sequenced to obtain full VH and VL sequences. To prepare RNA from hybridoma cells, cells were washed once in cold phosphate-buffered saline (pH 7.4) and immediately processed through the RNeasy Plus Micro Kit (QIAgen). Total RNA was eluted in nuclease-free water and mRNA converted to cDNA using AMV reverse transcriptase (NEB), primed with oligo (dT₂₀).

[0590] Initial PCR of heavy and light chain antibody-coding sequences was performed using primers and methods modified from Babcook et al. (Proc. Natl Acad Sci USA 1996 Jul. 23; 93(15): 7843) and von Boehmer et al. (Nat Protoc. 2016 October; 11(10): 1908), with cDNA as the nucleic acid template. PCR products were cloned into the pCRTOPO4 vector using the Zero Blunt™ TOPO™ PCR Cloning kit (Thermofisher Scientific) and transformed into E. cloni™ cells (Lucigen). Antibiotic-resistant clones were sequenced and analyzed for unique antibody-coding sequences.

[0591] A nested PCR reaction was then performed on these unique sequences using V-segment family and J-segment family-specific primers. The resulting amplicons were then cloned into pTT5-based expression plasmids (National Research Council, Montreal, QC). Unique heavy chain sequences and light chain sequences emerging from a single hybridoma sample were co-expressed in HEK293-6E cells (National Research Council) in all possible combinations to determine the correct heavy and light chain pairing. Antibodies produced were assayed for binding to antigen that was transiently expressed on HEK293 cells.

### Results

[0592] Of the 24 antibodies initially identified as binding to human 4-1BB, a total of 18 paired antibody VH and VL sequences (shown in Table 13) were obtained from the hybridomas and cloned into the pTT5 vector as human-mouse chimeric antibodies, with mouse VH and VL domains and a human IG1 Fc. Mouse VH domains were cloned in frame with a human CH1-hinge-CH2-CH3 construct, and mouse VL domains cloned in frame with the human kappa CL domain.

### Expression of 4-1BB Chimeric Antibodies

[0593] The 18 chimeric mouse-human 4-1BB antibodies were produced by transfection of two plasmids into HEK293-6E cells, one plasmid containing the heavy chain and the other plasmid containing the light chain.

[0594] HEK293-6E cells were split 1:10 72 hours prior to transfection to ensure growth-phase cells. These cells were then counted and resuspended at 10⁶ cellsml⁻¹ in OptiMEM™ (Thermofisher). A transfection mix was made by mixing 30 μl 293fectin™ (Thermofisher) and 1.5 ml OptiMEM™. This mix was then incubated at room temperature. After five minutes, 1. 5ml OptiMEM™ and 15 μg of each of the plasmids containing the antibody heavy or light chains in the pTT5 vector were added. This mix was then left at room temperature for 20 minutes, and then added dropwise to cells, with a total volume of 3 ml. Cells were then left at 37C in a 5% CO2 atmosphere in a shaking incubator at 120 rpm for five days.

[0595] In some cases, the antibody levels within the supernatant were quantified using an Octet™ RED96 (ForteBio) with a Protein A tip, and the supernatants used immediately in assays.

[0596] The supernatants were also purified using Protein A. To purify the antibodies, cells were first removed from the antibody supernatants by centrifuging at 1000 rcf for 15 minutes. Protein A Gravitrap™ columns were then prepared by equilibration using 10 ml PBS, followed by application of antibody supernatant in batches of 10ml. Once all of the supernatant had flowed through the column, the column was washed twice, each time with 10 ml PBS. Elution of the antibody was performed by the addition of 3 ml 0.1IM glycine-HCl pH 2.7. The eluted antibody sample was then neutralized using 1M Tris-HCl, pH 9.

[0597] To concentrate the antibody sample and perform a buffer exchange, the antibody samples were loaded into a Vivaspin™ 30 kDa MWCO protein concentrator spin column (GE Healthcare). The columns were then spun at 3000 rcf for 7 minutes to concentrate the antibody. 4 ml PBS was then added to the column to exchange buffers, and the column was then spun again, to exchange buffers into PBS. The antibody levels in the resulting solution were then measured using 260 nm/280 nm absorbance ratio using a Nanodrop™ Spectrophotometer (Thermofisher).

### Example 7

### Activity of Chimeric 4-1BB Antibodies in 4-1BB NF-kB-Luciferase Reporter Assay

[0598] To test the ability of chimeric mouse-human 4-1BB antibodies to stimulate 4-1BB activation and downstream signaling, a reporter gene assay was used. The cells used in this experiment produce luciferase under the control of the NF-kB promoter when signaling is induced by ligation of the 4-1BB receptor.

[0599] This experiment was set up in a manner similar to that described in Example 3, except that antibody supernatants were used in place of bispecific antibodies, and no tumour cells were used. The antibody supernatants were diluted in Assay Buffer (RPMI (Gibco)/1% FBS (Gibco)) to 5000 ng/ml, 1666 ng/ml, 554 ng/ml and 184 ng/ml. Rabbit-anti-human IgG Fc (Thermofisher) polyclonal secondary antibody was then added to a concentration of 15000 ng/ml and the antibody mixture left at room temperature.

[0600] After 45 minutes, 30 μl of the antibody mix was added to wells. If the concentration of antibody in the supernatant was below 5000 ng/ml, supernatants were diluted from neat (v20023, v20025, v20028, v22033. v22034). As a positive control, v12592 was diluted either in supernatant (ESN) or RPMI. The negative control was v16992 diluted in ESN. 4-1BB Thaw-and-use Jurkat cells (Promega) were then added, followed by a 5 hour incubation and then Bio-Glo™ reagent (Promega) was added, as described in Example 3. The data was acquired and analyzed as in Example 3.

### Results

[0601] Eight antibodies induced the production of luciferase: v20021, v20022, v20023, v20025, v20029, v20032, v20036, v20037 suggesting that they agonise 4-1BB (FIG. 7). These antibodies were then purified from supernatant and taken forward to assess which 4-1.13B domains they bound to.

### Example 8

### Determination of 4-1BB Domain Binding

[0602] To determine which domains of human 4-1BB the chimeric antibodies recognized, the chimeric antibodies were tested for binding to human 4-1BB, dog 4-1BB and a chimeric human-dog 4-1BB protein. The human-dog 4-1BB protein included a set of mutations within domain 4 that modified human 4-1BB to dog.

### Preparation of Human, Dog and Human-Dog 4-1BB

[0603] To generate expression constructs for soluble human, dog and human-dog chimeric 4-1BB, synthesized DNA having 4-1BB ECD-TEV-IgG1 hinge-CH2-CH3-10× His was made. Table 4 below provides the sequences of these constructs and FIG. 8A provides a representation of the 4-1BB portion of these constructs, Both dog and human 4-1BB extracellular domain included residues 24-186 of the 4-1BB protein sequence taken from Uniprot (IDs E2R1R9 and Q0107011 for dog and human 4-1BB, respectively). The mutations in the human-dog chimera to mimic dog 4-1BB in domain 4 were K115Q, C121R, R134Q, R154S and V156A (described in WO2012/032433).

TABLE 4
4-1BB domain-binding constructs

| | SEQ | |
|---|---|---|
| | ID | |
| Name | NO: | Sequence |
| 4-1BB | 39 | LQDPCSNCPAGTFCDNNRNQICSPCPNSFSSAGGQRTCDICRQCK |
| human | | GVFRTRKECSSTSNAECDCTPGFHCLGAGCSMCEQDCKQGQELTK |
| | | KGCKDCCFGTFNDQKRGICRPWTNCSLDGKSVLVNGTKERDVVCG |
| | | PSPADLSPGASSVTPPAPAREPGHSPQENLYFQSPKSCDKTHTCP |
| | | PCPAPELLGGPSVFLFPPKPKDTLMISRTPEVTCVVVDVSHEDPE |
| | | VKFNWYVDGVEVHNAKTKPREEQYNSTYRVVSVLTVLHQDWLNGK |
| | | EYKCKVSNKALPAPIEKTISKAKGQPREPQVYTLPPSRDELTKNQ |
| | | VSLTCLVKGFYPSDIAVEWESNGQPENNYKTTPPVLDSDGSFFLY |
| | | SKLTVDKSRWQQGNVFSCSVMHEALHNHYTQKSLSLSPGKGGHHH |
| | | HHHHHHH |
| 4-1BB | 40 | LQDPCSNCPAGTFCDNNRNQICSPCPPNSFSSAGGQRTCDICRQC |
| dog- | | KGVFRTRKECSSTSNAECDCTPGFHCLGAGCSMCEQDCKQGQELT |
| human | | KQGCKDCRFGTFNDQKRGICQPWTNCSLDGKSVLVNGTKESDAVC |
| | | GPSPADLSPGASSVTPPAPAREPGHSPQENLYFQSPKSCDKTHTC |
| | | PPCPAPELLGGPSVFLFPPKPKDTLMISRTPEVTCVVVDVSHEDP |
| | | EVKFNWYVDGVEVHNAKTKPREEQYNSTYRVVSVLTVLHQDWLNG |
| | | KEYKCKVSNKALPAPIEKTISKAKGQPREPQVYTLPPSRDELTKN |
| | | QVSLTCLVKGFYPSDIAVEWESNGQPENNYKTTPPVLDSDGSFFL |
| | | YSKLTVDKSRWQQGNVFSCSVMHEALHNHYTQKSLSLSPGKGGHH |
| | | HHHHHHHH |
| 4-1BB | 41 | IQDSCSKCPAGTFCGKNKSQICIPCPPNSFSSTSGQKACDICRQC |
| dog | | EGVFRTKKVCSPISNAECECISGFHCLGAGCTMCEQDCKQGQELT |
| | | KQGSCKDCRFGTFNDQKHGICQPWTNCSLDGKSVLVNGTKESDAV |
| | | CGPASAGFSPGTASATTPAPARDPGHTSQENLYFQSPKSCDKTHT |
| | | CPPCPAPELLGGPSVFLFPPKPKDTLMISRTPEVTCVVVDVSHED |
| | | PEVKFNWYVDGVEVHNAKTKPREEQYNSTYRVVSVLTVLHQDWLN |
| | | GKEYKCKVSNKALPAPIEKTISKAKGQPPEPQVYTLPPSRDELTK |
| | | NQVSLTCLVKGFYPSDIAVEWESNGQPENNYKTTPPVLDSDGSFF |
| | | LYSKLTVDKSRWQQGNVFSCSVMHEALHNHYTQKSLSLSPGKGGH |
| | | HHHHHHHHH |

[0604] The pTT5 vectors containing the 4-1BB expression constructs were then produced and purified in a manner similar to the antibodies in Example 1, except a 500 ml culture volume was used. Caliper results indicated that human, dog and chimeric human-dog, 4-1BB constructs were prepared in substantially pure form.

### Domain-Mapping of 4-1BB Antibodies by ELISA

[0605] A soluble antigen binding ELISA was performed to assess antibodies for their ability to bind outside of 4-1BB domain 4. The goal was to determine if samples have differential binding to hybrid or chimeric human-dog 4-1BB versus human 4-1BB to suggest whether or not binding is outside of domain 4. However, if the tested antibodies were able to bind to dog 4-1BB assessment of binding to domain 4 by this method would not be accomplished.

[0606] Soluble human, dog or human-dog 4-1BB-Fc proteins were prepared in PBS pH 7.4 (Thermo Fisher, Whetham, Mass.) at 400 ng/mL. 4-1BB-Fc proteins were added at 50 μL/well to wells of a 96-well flat bottom ELISA plates (Corning 3368). The plates were covered by a lid, sealed with parafilm, and left overnight at 4° C. The next day, the plates were washed three times with 300 μL/well distilled water using a BioTek 405 HT microplate washer (BioTek, Winooski, Vt.) and tapped to dry. Wells were then blocked by adding 200 μL/well blocking buffer (2% w/v skim milk powder in PBS) and left at room temperature for 1 hour. The plates were washed as previously and tapped to dry. Antibody samples were then diluted in assay buffer (2% w/v skim milk powder in PBS) to 10 μg/mL final or used neat if samples were below 10 μg/mL. Directly in assay plates, samples were serially diluted five times 1:8 in duplicate in assay buffer with a final volume of 50 μL/well. Similarly, control antibodies were prepared and diluted in assay buffer. For wells containing no antibody sample, assay buffer was added at 50 μL/well. The plates were then covered with a lid, sealed with parafilm, and incubated overnight at 4° C. The next day, plates were washed with the plate washer as previously and tapped dry. For detection of sample binding to soluble antigen, Peroxidase AffiniPure goat anti-human F(ab′)₂ (Jackson ImmunoResearch, West Grove, Pa.) was prepared in assay buffer at 0.4 μg/mL. For detection of coated antigen, Peroxidase AffiniPure goat anti-human Fc (Jackson ImmunoResearch, West Grove, Pa.) was prepared in assay buffer at 1 μg/mL. Both secondaries were added at 50 μL./well and plates were incubated at room temperature for 30 minutes. The plates were washed and dried as previous and TMB substrate (Cell Signaling Technology, Danvers, Mass.) was added at 50 μL/well. After incubation at room temperature for ten minutes, the reaction was neutralized with 1M HCl (VWR, Radnor, Pa.). The plate absorbance at OD450 was scanned on the BioTek Synergy™ H1 plate reader (BioTek, Winooski, Vt.).

### Results

[0607] As shown in FIGS. 9A to FIG. 9I, all chimeric antibodies tested were able to bind human 4-1BB. However, v20023 and v20029 also bound dog 4-1BB, suggesting that the domain binding of those two antibodies cannot be assessed by this method. The remaining antibodies did not bind dog 4-1BB.

[0608] v20022, 20025, v20032, v20036 and v20037 showed equal binding on human and human-dog chimeric 4-1BB, suggesting that all these antibodies bound outside domain 4 (amino acids 115-156). MOR7480.1-IG1 (variant 12592), as expected, showed a reduction of binding to dog-human chimeric 4-1BB compared to human 4-1BB, suggesting that its binding domain is within the amino acids 115-156. v12593, a version of Urelumab with an IgG1 Fc, similar to the tested antibodies, bound human and human-dog chimeric 4-1BB equally, suggesting that its binding domain also lies outside amino acids 115-156. v20027 did not show binding in this experiment and was excluded from future analysis.

### Domain Binding of Antibodies Using Truncated 4-1BB Proteins

[0609] As some of the antibodies were cross-reactive to dog 4-1BB, another method was required to determine to which domain antibodies bound. As an alternative, truncated transmembrane 4-1BB constructs were made, where 4-1BB domains 3 and 4 only would be expressed. FIG. 8B provides a representation of the truncated transmembrane 4-1BB constructs that were made.

Construction of4-1BB Domain Vectors

[0610] Constructs were synthesized having either full-length human 4-1BB (residues 24-255) or extracellular domains 3 and 4 (residues 86-255) along with the native human transmembrane and intracellular parts of 4-1BB. Full-length mouse 4-1BB was also cloned. All vectors also contained the native signal peptide (MGNSCYNIVATLLLVLNFERTRS, SE ID NO:42) and were run through Signal 4.1 (www.cbs.dtu.dk/services/SignalP/) to predict the successful cleavage of the signal peptide. All constructs were synthesized in the form 3′-EcoRI-4-1BB-BamHI-5′ and cloned into an EcoRI-BamHI digested pTT5 vector.

[0611] To test binding of antibodies to 4-1BB, 293E6 cells were transfected as before, except that all human 4-1BB constructs were co-transfected with mouse 4-1BB, to act as a carrier protein. Twenty-four hours after transfection, 2×10⁵ cells were labelled with 2.5 μg of antibody for one hour on ice, and then analysed by flow cytometry using a Attune cytometer (ThermoFisher, Waltham, Mass., U.S.). The antibodies had been pre-complexed with Zenon-Alexa-647 reagent (ThermoFisher) using manufacturer's instructions.

### Results

[0612] The results of this experiment are shown in FIG. 10, All antibodies showed binding to cells transfected with human 4-1BB and to cells transfected with human and mouse 4-1BB. Variant 16992, an anti-RSV antibody, was used as a negative control. As expected, v12592 showed binding to cells transfected with the 4-1BB domain 3 and 4 only construct (amino acids 86-255), as its hypothesized binding domain is between amino acids 115 and 156 (domain 4). v20022, v20023, v20025, v20029, v20032, v20036 and v20037 antibodies did not show binding to cells transfected with the domain 3 and 4 only construct, suggesting that all of the antibodies bind outside of those domains, and bind to an epitope at least partially within amino acids 24-85 of the mature 4-1BB protein. This data reinforces the conclusions of the human-dog chimera experiment, that v20022, v20025, v20029, v20036 and v20037 do not bind domain 4.

### Example 9

### Binding of Chimeric Anti-4-1BB Antibodies to Cynomolgus and Mouse 4-1BB

[0613] To assess the binding of v20022, v20023, v20025, v20029, v20032, v20036 and v20037 to native transmembrane Cynomolgus (Macaca fascicularis) and Mouse (Mus musculus) 4-1BB, a homogeneous cell binding assay was performed using the CellInsight CX5 platform (Thermo Fisher, Watham, Mass.). This experiment used cells transiently expressing either Cynomolgus or mouse 4-1BB.

[0614] To prepare cells for transfection, suspension HEK293-6e cells (National Research Council Canada, Montreal, QB) were cultured in 293 Freestyle Media (ThermoFisher, Waltham, Mass.), with 1% FBS (Corning, Corning, N.Y.) in 250 mL Erlenmeyer flasks (Corning, Corning, N.Y.) at 37 ° C., 5% CO2 in a humidified incubator with rotation at 115 rpm. Before transfection, HEK293-6e cells were re-suspended to 1×10⁶ cells/mL, in fresh 293 Freestyle media. Cells were then transfected using 293fectin™ transfection reagent (Thermo Fisher, Watham, Mass.) at a ratio of 1 μg DNA110⁶ cells in Opti-MEM™ Reduced Serum Medium (Thermo Fisher, Watham, Mass.). Cells were transfected with pTT5 DNA vectors containing either full length cynomolgus monkey 4-1BB with a flag-tag (CL#11070 SEQ ID NO:43), mouse 4-1BB-flag (CL#11063 SEQ ID NO:44) as shown in Table 5, or vector containing GFP as a control for transfection efficiency. The cells were incubated for 24 hours at 37° C., 5% CO2 in a humidified incubator with rotation at 115 rpm.

TABLE 5
Cynomolgus or mouse 4-1BB sequences

| | SEQ | |
|---|---|---|
| | ID | |
| Name | NO: | Sequence |
| Cyno 4- | | MGNSCYNIVATLLLVLNFERTRSLQDLCSNCPAGTFCDNN |
| 1BB- | 43 | RSQICSPCPPNSFSSAGGQRTCDICRQCKGVFKTRKECSS |
| Flag | | TSNAECDCISGYHCLGAECSMCEQDCKQGQELTKKGCKDC |
| | | CFGTFNDQKRGICRPWTNCSLDGKSVLVNGTKERDVVCGP |
| | | SPADLSPGASSATPPAPAREPGHSPQIIFFLALTSTVVLF |
| | | LLFFLVLDYKDDDDK |
| Mouse | 44 | MGNNCYNVVVIVLLLVGCEKVGAVQNSCDNCQPGTFCRKY |
| 4-1BB- | | NPVCKSCPPSTFSSIGGQPNCNICRVCAGYFRFKKFCSST |
| Flag | | HNAECECIEGFHCLGPQCTRCEKDCRPGQELTKQGCKTCS |
| | | LGTFNDQNGTGVCRPWTNCSLDGRSVLKTGTTEKDVVCGP |
| | | PVVSFSPSTTISVTPEGGPGGHSLQVLTLFLALTSALLLA |
| | | LIFITLLFDYKDDDDK |

[0615] Antibody samples were prepared at concentrations of neat, 1:4 and 1:16 final in PBS pH 7.4 (Thermo Fisher, Watham, Mass.)+2% FBS in Eppendorf tubes and 30 μl of antibody mix was added to wells of a 384-well black optical bottom plate (ThermoFisher). v12592 was used as a positive control for binding to Cynomolgus 4-1BB, and human IgG1 as a negative control. Anti-mouse 4-1BB antibody LOB12.3 (BioXCell, West Lebanon, N.H.) and its respective rat IgG1 isotype control (R&D Systems, Minneapolis, Minn.) were used as controls for mouse binding. A cell mixture of transfected HEK293-6e cells (10,000 cells per 30 μL), Vybrant™ DyeCycle™ Violet nuclear stain at 2 μM final (Thermo Fisher) and Goat anti Human IgG Fc A647 at 0.6 μg/mL (Jackson ImmunoResearch, Westgrove, Pa.) was prepared. The cells were vortexed briefly to mix added to wells at 30 μL/well. The plate was incubated at room temperature for 3 hours before scanning. Data analysis was performed on the CellInsight CXS with the HCS high content screening platform (ThermoFisher), using BioApplication “CellViability” with a 10× objective. Samples were scanned on the 385 nm channel to visualize nuclear staining and 650 nm channel to assess cell binding. The mean object average fluorescence intensity of A647 was measured on channel 2 to determine binding intensity. This intensity was then divided by the intensity of staining seen in the GFP-transfected wells to give a fold binding induced by the antibody.

### Results

[0616] All antibodies with the exception of v20020 (1B2) and v20031 (4B1) appeared to bind Cynomolgus 4-1BB (FIG. 11A). v12952 was used as a positive control for cyno 4-1BB binding, with higG1 being its matched isotype control, which does not show binding. No antibodies bound mouse 4-1BB (FIG. 11B). LOB12.3 was used as a positive control for binding to mouse 4-1BB, with the Rat IgG being a matched isotype control, which does not show binding. cl Example 10

### Humanization of Mouse 5G8, 1G1 and 1C8 VH and NT Sequences

[0617] Humanized versions of three of the mouse anti-human 4-1BB antibodies generated in Example 6 were prepared as described below.

[0618] Humanization of mouse 1C8, 1G-1 and 5G8 variable light (VL) and variable heavy (VH) domains was performed as follows. Sequence alignment of mouse 1C8 VH and VL sequences to respective human germlines identified IGHV3-66*03 and IGKV1D-33*01 among the closest as well as relatively frequent germlines in humans. Sequence alignment of mouse 1G1 VH and VL sequences to respective human germlines identified IGHV3-48*03 and IGKV3-11.*01 among the closest, as well as relatively frequent germlines in humans. Sequence alignment of mouse 5G8 VH and VL sequences to respective human germlines identified IGHV4-59*08 and IGKV1-16*01 among the closest, as well as relatively frequent germlines in humans. CDRs, identified according to AbM definition (see Table A), were ported onto the framework of these selected human germlines. FIG. 12 provides the sequences of the resulting VH (FIGS. 12 A-C) and VL sequences (FIG. 12 D-F). Back mutations to mouse residues in such generated sequence, at positions judged to likely be important for the retention of binding affinity to human 4-1BB, were included in such way to create several humanized sequences in which next one builds on the previous one, and where the first humanized sequence contains minimal number of back mutations or no back mutations.

[0619] For 1C8 this process led to four variable heavy chain humanized sequences and three variable light chain humanized sequences. For 1G1 this process led to three variable heavy chain humanized sequences and four variable light chain humanized sequences. For 5G8 this process led to four variable heavy chain humanized sequences and four variable light chain humanized sequences. Full heavy chain sequence containing humanized heavy chain variable domain (VH) and higG1 heavy chain constant domains (CH1, hinge, CH2, CH3), as well as full light chain sequence containing humanized light chain variable domain (VL) and human kappa light chain constant domain (kappa CL) were created for 1C8, 1G1 and 5G8. Antibodies were then assembled such that each humanized heavy chain was paired with each of the humanized light chains, making a total of twelve humanized variants each for 1C8 and 1G1, and 16 variants for 5G8, (Table 6). The amino acid sequences for each of the humanized heavy chains and humanized light chains are provided in Table 14.

TABLE 6
Humanized 1C8, 1G1 and 5G8 variants and their composition.

| | Composition |
|---|---|
| antibody Variant | HL |
| v20022 1C8 mouse-human | |
| parental chimera | |
| v28717 | H5L1 |
| v28719 | H5L2 |
| v28720 | H5L3 |
| v28721 | H6L1 |
| v28722 | H6L2 |
| v28723 | H6L3 |
| v28724 | H7L1 |
| v28725 | H7L2 |
| v28726 | H7L3 |
| v28727 | H8L1 |
| v28728 | H8L2 |
| v28730 | H8L3 |
| v20023 1G1 mouse-human | |
| parental chimera | |
| v28683 | H1L1 |
| v28684 | H1L2 |
| v28685 | H1L3 |
| v28686 | H1L4 |
| v28687 | H2L1 |
| v28688 | H2L2 |
| v28689 | H2L3 |
| v28690 | H2L4 |
| v28691 | H3L1 |
| v28692 | H3L2 |
| v28693 | H3L3 |
| v28694 | H3L4 |
| v20036 5G8 mouse-human | |
| parental chimera | |
| v28695 | H1L1 |
| v28696 | H1L2 |
| v28697 | H1L3 |
| v28698 | H1L4 |
| v28699 | H2L1 |
| v28700 | H2L2 |
| v28701 | H2L3 |
| v28702 | H2L4 |
| v28703 | H3L1 |
| v28704 | H3L2 |
| v28705 | H3L3 |
| v28706 | H3L4 |
| v28707 | H4L1 |
| v28711 | H4L2 |
| v28712 | H4L3 |
| v28713 | H4L4 |

### Production of Humanized Antibodies

[0620] Each of the humanized 1C8, 1G1 and 5G8 VH and VL sequences described in Table 6 as well as the parental mouse VH and VL sequences were used to prepare humanized antibodies in the naturally occurring, or FSA antibody format, containing two identical full-length heavy chains and two identical kappa light chains. Table X identifies the clones that make up each of the antibody constructs. The polypeptide sequences of each clone can be found in Table Y.

[0621] Each of the humanized VH domain sequences (SEQ ID NOs:45, 46, 47, 51, 52, 53, 56, 57, 61, 62, and 63) was appended to the human CH1-hinge-CH2-CH13 domain sequence of IGHG1*01 (SEQ ID NO:68) to obtain a protein sequence for four humanized 1C8, three humanized 1G1 and four humanized 5G8 full heavy chain sequences. Each of the humanized VL domain sequences (SEQ ID NOs:48, 49, 50, 54, 55, 58, 59, 60, 64, 65, and 66) was appended to the human kappa CL sequence of IGKC*01 (SEQ ID NO:67) to obtain a protein sequence for three humanized 1C8, four humanized 1G1 and four humanized 5G8 full light chain sequences. In a similar manner, 1C8, 1G1 and 5G8 mouse-human parental antibody chimera heavy and light chain sequences were assembled, with the difference that variable domain sequences were mouse (SEQ ID Nils:7, 9, 35 (VH) and 8, 10, 36 (VL)) and constant domain sequences were human (SEQ ID NOs:68 and 67 correspondingly). These sequences were reverse translated to DNA, codon optimized for mammalian expression, and gene synthesized.

[0622] All mouse-human parental and humanized full heavy and full light chain sequences were preceded by a signal peptide which is an artificially designed sequence MRPTWAWWLFLVLLLALWAPARG [SEQ NO:1] (ref: Barash S et al., Biochem and Biophys Res. Comm. 2002; 294, 835-842). For all parental and humanized heavy and light chains, vector inserts were prepared as described in Example 1 and cloned into pTT5 to produce expression vectors.

[0623] The heavy and light chains of antibody variants were expressed in 100 mL CHO cultures and purified as described in Example 1. Following protein-A purification, purity of samples was assessed by non-reducing and reducing High Throughput Protein Express assay as described in Example 1.

[0624] Post protein-A purification, samples were either buffer exchanged into DPBS and aseptically filtered or, depending on their homogeneity assessed by UPLC-SEC, subjected to SEC purification as described in Example 1.

### Results

[0625] Yields of protein post protein-A purification were in the range of ˜3.5-9 mg for humanized 1C8 variants, ˜4.5-9.5 mg for humanized 1G1 variants and ˜4.5-8 mg for humanized 5GS variants. Non-reducing and reducing LabChip post protein-A reflected single species corresponding to full size antibody and intact heavy and light chains in all cases (data not shown). Endotoxin levels were within the specifications.

### Example 11

### Biophysical Assessment of Purified Humanized 1C8, 1G1 and 5G8 Antibodies

[0626] Samples of humanized antibody variants were subjected to UPLC-SEC in order to assess species homogeneity following protein-A purification. UPLC-SEC was performed as described in Example 1.

### Results

[0627] UPLC-SEC analysis of protein A purified humanized 1C8 antibody variants was reflective of high species homogeneity in the case of variants 28717. 28719, 28720, 28721 (data not shown). UPLC-SEC profiles of all other humanized 1C8 variants (data not shown) reflected good homogeneity, as judged by the presence of small peaks (likely reflective of aggregates) and shoulder to the main peak (possibly reflective of different antibody conformation).

[0628] UPLC-SEC analysis of protein A purified humanized 1G1 antibody variants was reflective of high species homogeneity for variants 28683, 28684, 28685 and 28686. UPLC-SEC profiles of all other humanized 1G1 variants reflected slightly lower homogeneity (data not shown).

[0629] UPLC-SEC analysis of protein A purified humanized 5G8 antibody variants showed good species homogeneity for all variants. UPLC-SEC analysis was repeated for final pools of samples post SEC purification and these samples showed homogeneity in the range of 99.2-100.0% (data not shown).

### Example 12

### Binding of Humanized 1C8, 1G1 and 5G8 Antibodies to Human 4-1BB by SPR

[0630] To compare the ability a the humanized antibodies to bind human 4-1BB, the affinity of humanized antibodies was compared to the parental chimeric antibodies by Surface Plasmon Resonance (SPR).

[0631] Protein material post protein-A or SEC was assessed for binding to human 4-1BB. The antigen-binding affinity was determined by SPR as described in Example 2.

### Results

[0632] As can be seen from Table 7 (shown in Example 13), SPR binding assay performed on the humanized 1C8 variants revealed that four of the humanized 1C8 antibody variants (v28726, v28727, v28728, v28730) bound h4-1BB with comparable affinity to the parental chimera antibody (variant v20022) and eight variants did not bind h4-1BB. These variants have in common humanized 1C8 heavy chains H5 and H6 in combination with humanized 1C8 light chains L1, L2 or L3. Humanized IC8 light chains L1 and L2 also do not bind 4-1BB when in combination with humanized 1C8 heavy chain H7. These results suggest that back mutations to mouse residues at specific positions incorporated in humanized 1C8 heavy chain H8 as well as into humanized 1C8 light chain L3 are important to maintain CDR conformations such that binding to h4-1BB can be retained. FIG. 13 provides SPR sensorgrams for the parental chimera and representative humanized variants that were able to bind human 4-1BB.

[0633] As can be seen from Table 7, SPR binding assay performed on the humanized 1G1 variants revealed that all humanized 1G-1 antibody variants bound h4-1BB with affinity within 2-fold of the KD of the parental chimera antibody (variant v20023). This suggests that the frameworks of humanized 1G1 heavy and light chain without back mutations to mouse residues are sufficient to maintain the CDR conformations necessary for binding to h4-1BB, FIG. 14 provides SPR sensorgrams for the parental chimera and representative humanized variants that were able to bind human 4-1BB.

[0634] SPR binding assay performed on the humanized 5G8 variants showed, as can be seen in Table 7 and FIG. 15, that seven humanized 5G8 antibody variants (v28700, v28704, v28705, v28706, v28711, v28712, v28713) bound h4-1BB with affinity within 2-fold of the KD of the parental chimera antibody (variant v20036). Seven humanized 5G8 variants bound h4-1BB with 2-3× decreased affinity compared to the KD of the parental chimera antibody (v28696, v28697, v28698, v28701, v28702, v28703, v28707) and two variants did not bind h4-1BB. These two variants have in common humanized light chain L1. The seven 5G8 variants with slightly decreased affinity to 4-1BB have in common humanized heavy chain H1 or H2, or humanized heavy chain H3 or H4 in combination with humanized light chain 1. The results for humanized 5G8 antibody suggest that the back mutations to mouse residues at specific positions incorporated into L2, as well as into H3 are necessary to maintain the required CDR conformations to bind h4-1BB with a KD comparable to the parental chimera variant v20036.

### Example 13

### Comparison of Binding of Humanized Variants by Flow Cytometry

[0635] To examine binding of antibodies to native cell-surface expressed 4-1BB, a flow cytometry binding assay was carried out as described below.

[0636] Jurkat T cells engineered to stably express human 4-1BB were used to measure binding of antibodies to human 4-1BB. Antibodies were diluted in 5 μl FB (PBS 2% FCS) 1:3 from stock in wells of a 96 V-well plate, and cells added on top. The cells were then left on ice for 30 minutes for the antibodies to bind. The cells were then washed twice in FB, and then incubated in 50 μl FB containing 2 μg/ml goat anti-human Alexa647 antibody (Jackson Immunoresearch). The cells were then left on ice for a further 20 minutes, washed twice in FB, resuspended in 100 μl FB and analysed on a BD Fortessa™ X20. The subsequent data files were analysed using FlowJo™ and Prism 7 (GraphPad) using a four-parameter non-linear regression.

### Results

[0637] FIG. 16A, 16B and 16C depict the ability of the 1C8, 1G1 and 5G8 humanized antibodies, respectively, to bind to 4-1BB-expressing Jurkat T cells. Similar to the SPR results, antibodies which derive from the 1C8 paratope bound poorly, including the parental antibody, v20022. The original mouse 1G1 paratope, v22023, bound well to 4-1BB as would be expected from the SPR results. The humanized antibodies based on the 1G1 paratope also bound well, and there was little drop in binding seen as a result of humanization. Similarly, 5G8 antibodies also bound well, with some antibodies displaying greater binding to 4-1BB when compared to the parental mouse-human chimeric antibody v22036.

[0638] The results of the SPR and flow cytometry assays are summarized in Table 7 below.

TABLE 7
Antigen binding assessment of the humanized antibody variants by SPR

| | SPR | | Flow Cytometry | |
|---|---|---|---|---|
| | Mean KD | Std Dev | EC50 | EC50 |
| Variant | (M) n = 3 | KD (M) | (M) | Std Error (M) |
| v20022 1C8 mouse-human | 5.82E−07 | 1.38E−08 | 1.7298E−08 | 2.0338E−12 |
| parental chimera | | | | |
| v28717 | DNB | — | ND | — |
| v28719 | DNB | — | ND | — |
| v28720 | DNB | — | ND | — |
| v28721 | DNB | — | ND | — |
| v28722 | DNB | — | ND | — |
| v28723 | DNB | — | ND | — |
| v28724 | DNB | — | ND | — |
| v28725 | DNB | — | ND | — |
| v28726 | 7.63E−07 | 5.91E−08 | NF | NF |
| v28727 | 8.13E−07 | 3.59E−08 | 2.42E−08 | 1.40E−12 |
| v28728 | 1.42E−06 | 8.02E−08 | 7.13E−07 | 1.38E−11 |
| v28730 | 7.62E−07 | 4.69E−08 | 8.87E−08 | 1.12E−12 |
| v20023 1G1 mouse-human | 4.96E−08 | 8.08E−10 | 3.37E−10 | 8.69E−12 |
| parental chimera | | | | |
| v28683 | 4.23E−08 | 1.54E−09 | 2.23E−10 | 2.60E−11 |
| v28684 | 3.85E−08 | 9.29E−10 | 2.47E−10 | 1.78E−11 |
| v28685 | 3.12E−08 | 0 | 5.51E−11 | 1.71E−08 |
| v28686 | 3.11E−08 | 5.77E−11 | NF | NF |
| v28687 | 4.03E−08 | 3.51E−10 | 1.00E−09 | 2.39E−12 |
| v28688 | 6.92E−08 | 1.34E−09 | 3.60E−10 | 5.21E−12 |
| v28689 | 5.83E−08 | 5.69E−10 | 4.86E−10 | 2.32E−12 |
| v28690 | 3.44E−08 | 3.51E−10 | 3.76E−10 | 1.68E−12 |
| v28691 | 5.42E−08 | 1.8E−09 | 1.44E−09 | 1.89E−12 |
| v28692 | 4.64E−08 | 9.61E−10 | 7.71E−10 | 1.89E−12 |
| v28693 | 3.62E−08 | 7.77E−10 | 3.53E−10 | 3.34E−12 |
| v28694 | 3.47E−08 | 4.58E−10 | 4.55E−10 | 2.18E−12 |
| v20036 5G8 mouse-human | 2.66E−07 | 2.09E−08 | 1.69E−08 | 1.48E−12 |
| parental chimera | | | | |
| v28695 | DNB | — | ND | — |
| v28696 | 5.74E−07 | 9.76E−08 | NF | NF |
| v28697 | 7.35E−07 | 2.29E−08 | NF | NF |
| v28698 | 1.11E−06 | 1.25E−07 | 3.83E−08 | 1.35E−12 |
| v28699 | DNB | — | 4.71E−07 | 1.80E−12 |
| v28700 | 2.22E−07 | 3.95E−08 | 5.64E−08 | 1.64E−12 |
| v28701 | 6.10E−07 | 1.16E−08 | 3.00E−08 | 1.43E−12 |
| v28702 | 6.20E−07 | 6.35E−09 | 5.56E−08 | 1.46E−12 |
| v28703 | 8.11E−07 | 2.21E−08 | 3.58E−09 | 1.37E−12 |
| v28704 | 1.79E−07 | 2.31E−09 | 3.46E−09 | 1.35E−12 |
| v28705 | 1.95E−07 | 3.79E−09 | 3.32E−09 | 1.37E−12 |
| v28706 | 1.59E−07 | 5.77E−10 | 1.92E−09 | 2.05E−12 |
| v28707 | 7.32E−07 | 3.74E−08 | 5.16E−08 | 1.28E−12 |
| v28711 | 2.27E−07 | 3.51E−09 | 1.39E−07 | 6.05E−12 |
| v28712 | 2.29E−07 | 4.36E−09 | 3.56E−09 | 1.61E−12 |
| v28713 | 1.84E−07 | 6.43E−09 | 2.34E−09 | 1.41E−12 |

DNB = did not bind
ND = not tested
NF = no fit (for 4-parameter nonlinear regression model)

### Example 14

### Thermal Stability Assessment of Humanized Antibodies

[0639] In order to fully characterize humanized 1C8, 1G1 and 5G8 variants with affinity to human 4-1BB, the thermal stability of select antibody samples was assessed by differential scanning calorimetry (DSC) as described below.

[0640] The thermal stability of humanized 1C8, 1G1 and 5G8 antibody variants was measured using DSC as follows. 400 μL of purified samples primarily at concentrations of 0.4 mg/mL in PBS were used for DSC analysis with a VPT-Capillary DSC (GE Healthcare, Chicago, Ill.). At the start of each DSC run, 5 buffer blank injections were performed to stabilize the baseline, and a buffer injection was placed before each sample injection for referencing. Each sample was scanned from 20 to 100° C. at a 60° C./hr rate, with low feedback, 8 sec filter, 3 or 5 min pre-scan thermostat, and 70 psi nitrogen pressure. The resulting thermograms were referenced and analyzed using Origin 7 software to determine melting temperature (Tm) as an indicator of thermal stability.

### Results

[0641] The results are shown in Table 8 below.

TABLE 8
Thermal stability of humanized antibodies

| Variant Identifier | Fab Tm (° C.) |
|---|---|
| v20022 1C8 mouse-human | 88.1 |
| parental chimera | |
| v28726 | 92.0 |
| v28727 | 93.3 |
| v28730 | 94.0 |
| v20023 1G1 mouse-human | 73.2 |
| parental chimera | |
| v28683 | 84.0 |
| v28684 | 84.0 |
| v28685 | 83.4 |
| v28688 | 82.7 |
| v28689 | 81.8 |
| v28692 | 82.2 |
| v28693 | 81.1 |
| v20036 5G8 mouse-human | 82.6 |
| parental chimera | |
| v28696 | 90.8 |
| v28700 | 89.2 |
| v28704 | 89.9 |
| v28705 | 90.9 |
| v28711 | 90.5 |
| v28712 | 91.4 |

[0642] As can be seen in Table 8, determined Fab Tm values of select humanized 1C8 antibody variants are ˜-4-6° C. higher compared to the parental mouse chimera v20022. FIG. 17 shows the corresponding DSC thermograms of the 1C8 variants that were tested.

[0643] For humanized 1G1 antibody variants, as can be seen from Table 8, determined Fab Tm values of select variants are 9˜11° C. higher than the Tm of the parental mouse chimera v20023. FIG. 18 shows the corresponding DSC thermograms of the 1G1 variants that were tested.

[0644] For humanized 5G8 antibody variants, as can be seen from Table 8, determined Fab Tm values of select variants are ˜7-9° C. higher than the Tm of the parental mouse chimera v20036. FIG. 19 shows the corresponding DSC thermograms of the 5G8 variants that were tested.

### Example 15

### Purity Assessment of Humanized 1C8, 1G1 and 5G8 Antibody Variants

[0645] The apparent purity of the humanized antibody variants prepared as described in Example 10 was assessed using mass spectrometry after non-denaturating deglycosylation. Samples of humanized variants were prepared and analyzed by LCMS as described in Example 1.

### Results

[0646] All humanized 1C8, 1G1 and 5G8 antibody variants were of 100% species purity. A representative LC-MS profile for one of the 1C8 humanized antibodies is shown in FIG. 20.

### Example 16

### Activation of 4-1BB by Humanized Antibodies

[0647] To determine if the humanized antibodies retained functionality post-humanization, they were tested in the 4-1BB NF-kB reporter gene assay according to the method described in Example 3.

### Results

[0648] As seen in FIG. 21A, 1C8 showed a slight drop in potency compared to the parental v20022 antibody, as expected from the slight drop in binding seen in FIG. 16A. Similar to the flow cytometric binding in FIG. 16B, 1G1 retained functionality, with antibodies showing similar potency to the parental chimeric 4-1BB antibody v20023 (FIG. 21B). The humanized antibodies based on 5G8, similar to those based on 1C8, showed a slight decrease in potency compared to the parental antibody (FIG. 21C).

### Example 17

### Generation of Additional 4-1BB×TAA Antibody Constructs

[0649] The experiments described in Examples 1-3 identified a format in which 4-1BB×HER2 antibodies were able to cross-link 4-1BB and stimulate downstream 4-1BB signaling and the production of cytokine by T cells. To determine if this effect was specific to HER2 targeting or HER2-expressing tumours or if it can be also transferred to other tumour-associated antigens, 4-1BB×mesothelin (MSLN), 4-1BB×NaPi2b and 4-1BB×FRα antibodies were prepared.

### Design of 4-1BB×MSLN, 4-1BB×NaPi2b and 4-1BB×FRα Bispecific Antibodies

[0650] To allow testing of different tumour-associated antigens, bispecific antibody constructs were prepared in a similar format to the most active 4-1BB×HER2 bispecific constructs with two 4-1.BB Fab and one TAA scFv at the C-terminus of the Fc, as shown in FIG. 2B. Like the 4-1BB×HER2 bispecific antibody constructs described in Example 1, these bispecific antibody constructs comprised a human IgG1heterodimeric Fc having CH3 domain amino acid substitutions Het FcA and Het FcB, which drive association of the two component Fc polypeptides, Bispecific antibody constructs noted as “FcKO” included the following CH2 mutations designed to knock out or reduce FcγR binding: L234A, L235 A and D265S. Table 9 summarizes the antibody constructs that were prepared and FIG. 22 provides a representation of the formats of these antibody constructs. Control constructs 17717 (mirvetuximab), 17449 (farletuzumab), 18490 (RG7787), and 18993 (lifastuzumab) for each TAA paratope are also depicted in FIG. 22 and are described in Example 18.

TABLE 9
Description of 4-1BB × TAA antibodies

| | | Format | 4-1BB | TAA | Fc |
|---|---|---|---|---|---|
| Variant | TAA target | (4-1BB × TAA) | Paratope | Paratope | modifications |
| v22630 | Mesothelin | 2 × 1 | MOR7480.1 | Anetumab | FcKO |
| | | | | (VHVL) | |
| v22353 | Mesothelin | 2 × 2 | MOR7480.1 | Anetumab | FcKO |
| | | | | (VHVL) | |
| v22639 | Mesothelin | 2 × 1 | MOR7480.1 | RG7787 | FcKO |
| | | | | (VHVL) | |
| v22329 | Mesothelin | 2 × 2 | MOR7480.1 | RG7787 | FcKO |
| | | | | (VHVL) | |
| v22635 | NaPi2b | 2 × 1 | MOR7480.1 | MX-35 | FcKO |
| | | | | (VLVH) | |
| v22341 | NaPi2b | 2 × 2 | MOR7480.1 | MX-35 | FcKO |
| | | | | (VHVL) | |
| v22636 | NaPi2b | 2 × 1 | MOR7480.1 | Lifastuzumab | FcKO |
| | | | | (VHVL) | |
| v22345 | NaPi2b | 2 × 2 | MOR7480.1 | Lifastuzumab | FcKO |
| | | | | (VHVL) | |
| v22638 | FRα | 2 × 1 | MOR7480.1 | Mirvetuximab | FcKO |
| | | | | (VHVL) | |
| v12592 | 4-1BB | 2 × 0 | MOR7480.1 | None | FcWT |
| (control) | | | | | |
| v16992 | RSV | 0 × 0 | Palivizumab | None | FcKO |
| (control) | | | | | |

[0651] The sequences corresponding to the VH and VL of MOR7480.1 are provided in Table 15. The sequences of the scFvs used to construct the anti-TAA arm of the antibody constructs are provided in Table 16. Table X identifies the clones that make up each of the antibody constructs. The polypeptide sequences of each clone can be found in Table Y.

### Production of 4-1BB×TAA Antibodies

[0652] To allow the production of bispecific antibodies, constructs were made in a similar manner to Example 1.

### Production and Purification of Bispecific Antibodies

[0653] Antibodies were produced by transfecting CHO-2E7 cells, and purified using Protein A and prep-SEC, as described in Example 1. After purification, the antibodies were checked for purity and lack of aggregation using LC/MS and UPLC-SEC.

### Example 18

### Quantification of Surface TAA Protein on Tumor Cells

[0654] To determine what threshold of TAA expression is required on the tumour in order to stimulate 4-1BB signaling in T cells, the levels of mesothelia (MSLN), NaPi2b and FRα surface protein were measured in several tumour cell lines. This was achieved using quantitative flow cytometry using a set of beads with known levels of antibody bound as described below.

[0655] IGROV1, OVCAR3, H441, H661, H226. H1975 and A549 tumor cells were cultured in RPMI 10% FCS in 10 cm³ plates. These cell lines were chosen due to RNA data suggesting that they would be a representative set of Ovarian and bung cell lines expressing high, medium or low MSLN, NaPi2b and FRα. Cell dissociation buffer (Invitrogen) was added, and cells removed from the plate with mechanical means if necessary, using either a pipette or a cell scraper. Cells were left on ice with a pre-determined excess level of conjugated antibody, to ensure that the cells in the suspension are completely labelled. A series of beads with pre-determined levels of anti-human coating antibody were used as standards (816; Bangs Laboratories). Numbers of receptor per cell were calculated by comparing the level of AlexaFluor647 fluorescence on the tumour cells to a standard curve constructed using the calibration beads.

[0656] For conjugation with Alexa Fluor 647, antibodies were buffer exchanged into sodium bicarbonate buffer pH 8.4 using 40 kDa Zeba columns. An aliquot of each of the buffer exchanged material was then reacted with 10 eq. of NHS-Alexa Fluor 647 (Thermofisher A20006, 10 mM). Each reaction was allowed to proceed protected from light at room temperature for 90 minutes. Following incubation, each reaction was then purified. using a 40 kDa Zeba column, pre-equilibrated with PBS pH7.4. Conjugation was confirmed by SEC chromatography (Ex: 650 nm, Em: 665nm). SEC analysis also estimated the amount of unpurified NHS-Alexa Fluor 647.

| Target | Antibody Used | Anti-TAA paratope |
|---|---|---|
| FRα | v17717 | Mirvetuximab |
| FRα | v17449 | Farletuzumab |
| mesothelin (MSLN) | v18490 | RG7787 |
| NaPi2b | v18993 | Lifastuzumab |

### Results

[0657] Table 10 provides the results of surface TAA quantification and identifies tumour cell lines with high, medium and low expression of TAAs MSLN, FRα and NaPi2b.

TABLE 10
Surface TAA quantification on tumor cell lines

| | | MSLN | FRα | NaPi2b |
|---|---|---|---|---|
| | | (receptors/ | (receptors/ | (receptors/ |
| Cell line | Origin | cell) | cell) | cell) |
| IGROV1 | Ovarian Adenocarcinoma | 32917 | 1050311 | 995590 |
| OVCAR3 | Ovarian Adenocarcinoma | 288505 | 553495 | 1190046 |
| H226 | Lung Squamous | 1723332 | 307821 | 313349 |
| H441 | Lung Adenocarcinoma | 29239 | 186147 | 196188 |
| HCC827 | Lung Adenocarcinoma | 41161 | 177901 | 558926 |
| H661 | Lung Large Cell | 313615 | 176107 | 231227 |
| | Carcinoma | | | |
| H1573 | Lung Adenocarcinoma | 201484 | 136378 | 141558 |
| H1975 | Lung Adenocarcinoma | 156500 | 107420 | 103402 |
| H1563 | Lung Adenocarcinoma | 760672 | 75326 | 85979 |
| H1299 | Lung Carcinoma | 71333 | 39336 | 45395 |

### Example 19

### Ability of 4-1BB×TAA Bispecific Antibody Constructs to Stimulate 4-1BB Activity

[0658] To test the ability of bispecific 4-1BB×MSLN, 4-1BB×NaPi2b and 4-1BB×FRα antibodies to stimulate 4-1BB activity in the presence of a tumor cell, a co-culture reporter gene assay was employed.

### 4-1BB NF-kB-Lueiferase Reporter Assay

[0659] This experiment was undertaken similarly to the experiment in Example 3, except either H226, H661, H441, H1975, IGROV1, H1299 or A549 tumour cells were used. Briefly, NFκB-luc2P/4-1BB Jurkat cells were mixed with tumour cells in CD3-coated plates and left for 5 hours. The production of luciferase was then measured using Bio-Glo™ substrate, Data was analyzed using Prism 7 (GraphPad) and four-parameter variable slope nonlinear fit.

### Results

[0660] The results are shown in FIGS. 23A and 23B. 4-1BB×MSLN antibodies showed activity on H226 cells, but not A549 cells. v12592, which is a similar format antibody to the bispecific antibody construct but without the C-terminal anti-TAA say, does not show activity in this experiment on any of the cell lines, suggesting that crosslinking via the TAA may be necessary in order to function.

[0661] FIG. 24 shows the activity of the 4-1BB×FRα antibody v22638 on 4-1BB reporter cells in co-culture with a series of tumour lines representing a range of expression. When the 4-1BB reporter cells were cultured in presence of v22638 and tumour cells with greater than ˜150,000 FRα proteins per cell (IGROV1, H441, H661) an activation of the reporter genes was seen. In co-culture with tumour cells with lower levels of FRα, such as the H1299 cells, no activation of 4-1BB was seen. The ability of 4-1BB×FRα construct v22638 to stimulate 4-1BB activity appeared to be dependent on the level of FRα expression by tumour cells in this co-culture experiment. v22638 showed activity on FRα^{high} IGROV1 cells and FRα^{mid} H441 and H661 cells but did not shop: activity on FRα^{low} A549 or H1975 cells.

### Primary T Cell-Tumour Co-Culture Assay

[0662] Similar to Example 5, CD8+ cells were cultured with IGROV1, OVCAR3, H441, H661, H226, H1975 or A549 tumor cells and aAPC/CHO-K1 cells. After four days, supernatants were taken and IFNγ measured by HTRF. GraphPad Prism y7 was used for data analysis, using the non-linear four-parameter model.

### Results

[0663] Similar to the results seen with the reporter gene assay, bispecific antibodies induced cytokine production by T cells when in co-culture with tumour cells expressing the cross-linking tumour antigen. The 4-1BB×MSLN antibody v22630 induced 1FNγ production by T cells when co-cultured with H226 cells which express high levels of MSLN, but not other tumour cells which express <300,000 MSLN molecules/cell (FIG. 25B). v22638, which is a bispecific antibody targeting 4-1BB and FRα shows activity on T cells in co-culture with IGROV1, OVCAR3 and H441 cells, suggesting a similar cut-off for expression of ˜200,000 FRα molecules/cell (FIG. 25C). The NaPi2b×4-1BB antibody construct v22345 was able to enhance IFNγ production by T cells co-cultured with NaPi2b^{high} IGROV1 or OVCAR3 cells and NaPi2b^{mid} H441 cells, but not NaPi2b^{mid-low} H661, F1226, A549 or H1975 cells. This suggests that a cut-off of ˜200,000-300,000 NaPi2b molecules/cell is required for function in vitro (FIG. 25A). No effect of v12592, the parental 4-1B.B antibody without a TAA cross-linking arm, was seen on the T cells in co-culture with any of the tumour cell lines, suggesting that cross-linking via the TAA arm was absolutely required for activity (FIG. 25D).

### Example 20

### Preparation of Additional 4-1BB×FRα Antibodies

[0664] Additional 4-1BB×FRα antibody constructs (antibodies) were prepared according to the methods described in Example 1. Table 11 describes the compositions of these additional 4-1BB×FRα antibodies, while FIG. 26 provides a representation of the formats of exemplary antibodies. These 4-1BB×FRα antibody constructs were constructed using a subset of the mouse anti-4-1BB paratopes described in Example 7 that were shown to be agonistic to 4-1BB, and the anti-FRα paratopes mirvetuximab, rabbit paratope 1H06, and rabbit paratope 8K22. FRα paratopes 1H06 and 8K22 are novel rabbit anti-FRα paratopes generated as described in Example 23.

TABLE 11
Composition of 4-1BB × FRα antibodies

| | Format | 4-1BB | FRα |
|---|---|---|---|
| Variant | (4-1BB × FRα) | Paratope | Paratope |
| v23646 | 2 × 1 | 1C8 | 1H06 (VHVL) |
| v23649 | 2 × 1 | 5G8 | 1H06 (VHVL) |
| v23651 | 2 × 1 | 1C8 | Mirvetuximab |
| | | | (scFv) |
| v23656 | 2 × 1 | 1C8 | 8K22 (VLVH) |
| v23657 | 2 × 1 | 2E8 | 8K22 (VLVH) |
| v23658 | 2 × 1 | 4E6 | 8K22 (VLVH) |
| v23659 | 2 × 1 | 5G8 | 8K22 (VLVH) |
| v23660 | 2 × 1 | 6B3 | 8K22 (VLVH) |
| v23661 | 2 × 1 | 1C8 | 1H06 (VLVH) |
| v23662 | 2 × 1 | 2E8 | 1H06 (VLVH) |
| v23663 | 2 × 1 | 4E6 | 1H06 (VLVH) |
| v23664 | 2 × 1 | 5G8 | 1H06 (VLVH) |
| v23665 | 2 × 1 | 6B3 | 1H06 (VLVH) |
| v20022 | 2 × 0 | 1C8 | None |
| v20036 | 2 × 0 | 5G8 | None |
| v12592 (control | 2 × 0 | MOR7480.1 | None |
| monospecific anti- | | | |
| 4-1BB antibody) | | | |
| v16976 (negative | 0 × 0 | None | None |
| control, CR8071 | | | |
| antibody with Het | | | |
| FcA, FcB, and FcKO | | | |
| Fc modifications) | | | |
| v17721 (control | 0 × 1 | None | Mirvetuximab |
| one-armed anti- | | | (scFv) |
| FRα antibody) | | | |

[0665] Table X identifies the clones that make up each of the antibody constructs. The polypeptide sequences of each clone can be found in Table Y.

[0666] The expressed and purified antibodies were then tested as described in Examples 21 and 22.

### Example 21

### Characterization of 4-1BB×FRα Antibody Constructs Binding to 4-BB and FRα

[0667] To test the ability of the 4-1BB×FRα antibody constructs produced in Example 20 to bind 4-1BB, the affinity of these constructs for human 4-1BB was measured by SPR and by flow cytometry.

### SPR

[0668] Variants purified by SEC were assessed for binding to human 4-1BB. The antigen-binding affinity was determined by SPR according to the method described in Example 2. A summary of the SPR binding data is provided in Table 12.

TABLE 12
Binding data for 4-1BB × FRα bispecific antibodies

| Variant | KD (M) |
|---|---|
| v12592 | 1.87 × 10⁻⁸ |
| v23656 | 4.8 × 10⁻⁷ |
| v23657 | 1.75 × 10⁻⁷ |
| v23658 | 4.99 × 10⁻⁷ |
| v23659 | 2.08 × 10⁻⁷ |
| v23660 | 3.64 × 10⁻⁷ |
| v23661 | 5.35 × 10⁻⁷ |
| v23662 | 1.55 × 10⁻⁷ |
| v23663 | 5.02 × 10⁻⁷ |
| v23664 | 2.2 × 10⁻⁷ |
| v23665 | 4.64 × 10⁻⁷ |

[0669] All of the 4-1BB×FRα antibodies tested showed binding to 4-1BB, and had a KD representing affinity that was between approximately 20-100 fold lower than the control anti-4-1BB antibody MOR7480.1 (v12592) as measured by SPR.

### Binding of 4-1BB×FRα Antibody Constructs to 4-1BB-Expressing Jurkat T Cells by Flow Cytometry

[0670] To examine binding of these antibodies to native cell surface-expressed 4-1BB, a flow cytometry binding assay was carried out.

[0671] Jurkat T cells engineered to stably express human 4-1BB were used to measure binding of antibodies to human 4-1BB. Antibodies were diluted in 50 μl FB (PBS 2% FCS) 1:3 from stock in wells of a 96 V-well plate, and cells added on top. The cells were then left on ice for 30 minutes for the antibodies to bind. The cells were then washed twice in FB, and incubated in 50 μl FB containing 2 μg/ml goat anti-human Alexa647 antibody (Jackson Immunoresearch). The cells were then left on ice for a further 20 minutes, washed twice in FB, resuspended in 100 μl FB and analysed on a BD Fortessa™ X20. The subsequent data files were analysed using FlowJo™ and Prism™ 7 (GraphPad) using a four-parameter non-linear regression.

### Results

[0672] All variants except v23663 showed binding. Similar to the SPR results, the antibodies tested in this experiment showed lower affinity compared to v12592 (FIG. 27A to 27F). FIG. 27F shows the results for the control variant 22638, a 4-1BB×FRα bispecific antibody with MOR7480.1 (4.-1BB) and mirvetuximab (FRα) paratopes.

### Binding of 4-1BB×FRα Antibody Constructs to FRα Expressed on 293E Cells by Flow Cytometry

[0673] To examine binding of antibodies to FRα expressed on the cell surface, 293E cells were transiently transfected with full-length FRα (SEQ ID NO:80). Antibodies were diluted in 50 μl FB (PBS 2% FCS) 1:3 from stock in wells of a 96 V-well plate, and cells added on top. The cells were then left on ice for 30 minutes for the antibodies to bind. The cells were then washed twice in FB, and incubated in 50 μl FB containing 2 μg/ml goat anti-human Alexa647 antibody (Jackson Immunoresearch). The cells were then left on ice for a further 20 minutes, washed twice in FB, resuspended in 100 μl FB and analyzed on a BD Fortessa™ X20. The subsequent data files were analyzed using FlowJo™ and Prism 7 (GraphPad).

[0674] The results are shown in FIG. 28 and demonstrate that all antibodies showed binding to FRα. Sample containing the 8K22 scFv (FIG. 28A) showed higher binding than the 1H06 scFv (FIG. 28B), suggesting that it is of higher affinity as an scFv. Antibodies containing a mirvetuximab scFv (FIG. 28C) showed intermediate binding between 8K22 and 1H06, suggesting that its affinity is between the two.

### Example 22

### Activation of T Cells by 4-1BB×FRα Bispecific Antibodies

[0675] After confirmation of binding of 4-1BB×FRα antibodies to both 4-1BB and FRα, the bispecific antibodies were examined in a primary T cell activity assay. The experiment looked at the ability of 4-1BB to stimulate the production of IFNγ by T cells in the culture. Co-culture of T cells with tumour cells allowed the investigation of crosslinking of the 4-1BB antibodies by TAA on tumour cells. IGROV1. cells were chosen due to their high expression of FRα, and A549 for low expression of FRα.

[0676] The method used was similar to that used in Example 5. Bispecific antibodies, CD8+ T cells and either IGROV1 or A549 tumour cells were cultured together with aAPC/CHO-K1cells. After four days, supernatants were taken and IFNγ measured by HTRF.

### Results

[0677] All 4-1BB×FRα antibodies stimulated IFNγ production by T cells when in co-culture with FRα^{high} IGROV1 cells (FIG. 29A and 29 B). In culture with FRα^{low} A549 cells, there was no effect of the 4-1BB×FRα antibodies seen on the T cells, suggesting that this cell line may not express FRα at a level sufficient for the 4-1BB×FRα antibodies to stimulate IFNγ production by T cells. In the absence of a tumour-targeting arm, 4-1BB monospecific antibodies v12592, v20022 and v20036 could not stimulate cytokine production when in culture with IGROV1 or A549 cells (FIG. 29C). v22368 acted as a positive control and comparator.

[0678] It was also found that 4-1BB antibody affinity did not affect the response of the T cells in this experiment. The difference in activity between the antibodies may be due to the difference in binding between the 1H06 and 8K22 scFvs (8K22 demonstrated greater binding to FRα by flow cytometry than did 1H06, and also showed greater activity in stimulating IFNγ production).

### Example 23

### Generation of Rabbit Antibodies that Bind Human FRα

[0679] Antibodies to Folate receptor alpha (FRα) were raised in rabbits immunized with soluble HIS tagged human folate receptor 1 antigen (FRα-HIS, AcroBiosystems Cat #FO1-F182E2). The 8K22. and 1H06 paratopes described in Example 20 were identified by the method described here.

[0680] Briefly, New Zealand white rabbits were given a primary injection followed by 4 additional boosts of the FRα-HIS antigen mixed with adjuvant. Each of the boosts were separated by 14 days. Anti human FRα antibodies titers were determined by FACs using transiently expressing human FRα CHO cells to choose which animal to harvest for B cells.

### Recovery of B Cells and Discovery of Anti-Human FRα Antibodies by SLAM:

[0681] Immunized rabbits with desired titers about 100,000 were sacrificed, and the spleens harvested. The lymphoid cells were dissociated by grinding in FACs buffer (PBS 2% FBS) to release the cells from the tissues. The cells were pelletal and then suspended for 1 min in 5 ml of BD Pharm Lyse to lyse red blood cells. Equal volume of FACs buffer was added to neutralize the Pharm Lyse and the resultant lymphocyte sample was pelleted and suspended in FACs buffer.

[0682] The lymphocyte suspension was then stained with anti-rabbit IgG Alexa-Fluor 647 to identify IgG+ B cells. After 30 min of staining, IgG+ B cells were sorted on a FACSAria (BD Biosciences) and counted. Using the Selected Lymphocyte Antibody Method (SLAM) (Proc Natl Acad Sci USA. 1996 Jul. 23; 93(15): 7843-7848. John Babcook et al), B cells were plated at different densities ranging from single cell up to 50 cells in a 384 well plate, expanded in culture for 7 days and the supernatants harvested to detect for anti-human FRα antibodies. The 384 well ;gates were frozen down in a −80 C freezer.

[0683] Supernatants were screened for human FRα specific monoclonal antibodies by ELISA. 384 well ELISA plates were coated with 25 μL/well of human FRα-HIS (2 μg/mL) in PBS, then incubated at 4° C. overnight. After incubation, the plates were washed with water 2 times. 90 μL/well Blocking Buffer (2% skim milk, PBS) were added and the plates incubated at room temperature for 1 hour. After incubation, the plates were washed and 12.5 μL/well of antibody containing supernatants+12.5 μl Blocking Buffer, and positive and negative controls were added and the plates incubated at room temperature for 2 hours.

[0684] After incubation, the plates were washed, 25 μl of 0.4 ug/ml goat anti-rabbit IgG Fc-HRP detection antibody was added to each well and the plates were incubated at room temperature for 1 hour. After the incubation, the plates were washed and 25 μl of TMB were added and the plates allowed to develop for about 10 minutes (until negative control wells barely started to show color). Then 25 μl stop solution (1N HCL) were added to each well and the plates read on an ELISA plate reader at wavelength 450 nm.

### Sequencing of Anti-Human FRα Monoclonal Antibodies:

[0685] Wells containing antibodies of desired characteristics were treated with RNA lysis buffer (Qiagen RNeasy) for molecular rescue of antibody heavy and light chains. Initial PCR of heavy and light chain antibody-coding sequences was performed using primers and methods modified from Babcook et al. (Proc Natl Acad Sci USA 1996 Jul. 23; 93(15): 7843) and von Boehmer et al. (Nat Protoc. 2016 October; 11(10): 1908), with cDNA as the nucleic acid template. PCR products were cloned into the pCRTOPO4 vector using the Zero Blunt™ TOPO™ PCR. Cloning kit (Thermofisher Scientific) and transformed into E. cloni™ cells (Lucigen). Antibiotic-resistant clones were sequenced and analyzed for unique antibody-coding sequences.

[0686] A nested PCR reaction was then performed on these unique sequences using V-segment family and J-segment family-specific primers. The resulting amplicons were then cloned into pTT5-based expression plasmids (National Research Council of Canada). Unique heavy chain sequences and light chain sequences emerging from a single well sample were co-expressed in HEK293-6E cells (National Research Council of Canada) in all possible combinations to determine the correct heavy and light chain pairing. Antibodies produced were assayed for binding to antigen that was transiently expressed on HEK293 cells.

### Example 24

### Humanization of Rabbit 8K22 VH and VL Sequences

[0687] A rabbit anti-human folate receptor alpha (anti-hFRα) antibody, 8K22, which was generated as described in Example 23, was humanized as described below.

[0688] Sequence alignment of rabbit 8K22 VH and VL sequences to respective human germline sequences identified IGHV3-66*01 and IGKVI-39*01 as the closest, as well as frequent, human germline sequences. CDRs according to the AbM definition (<http://www.bioinf.org.uk/abs/#cdrdef>) were ported onto the framework of these selected human germline sequences as shown in FIG. 40. Back mutations to rabbit residues in the resultant sequences at positions judged likely to be important for the retention of binding affinity to antigen, hFRα, were included creating several humanized sequences in which generated sequences for the most part built on the previous sequence, and where the first humanized sequence (H1 and L1, Table 19) contained the minimal number of back mutations. None of the variants modified the CDRs of the 8K22 antibody as defined by the AbM method.

[0689] This process provided five variable heavy chain humanized sequences and five variable light chain humanized sequences. Full heavy chain sequences containing humanized heavy chain variable domain (VH) and hIgG1 heavy chain constant domains (CH1, hinge, CH2, CH3), and full light chain sequence containing humanized light chain variable domain (VL) and human kappa light chain constant domain (kappa CL) were assembled. Monoclonal antibody (mAb) variants were then assembled such that each of the humanized heavy chains was paired with each of the humanized light chains, providing a total of twenty-five humanized variants to be evaluated experimentally (Table 19).

### Example 25

### Humanized 8K22 Antibody Production

[0690] The humanized 8K22 antibodies described in Example 24 and Table 19 were prepared as follows.

[0691] Each of the humanized 8K22 constructs, as well as the parental 8K22 construct, were in the naturally occurring or FSA format, containing two identical full-length heavy chains and two identical kappa light chains. The amino acid sequences of each of the antibody variable heavy chains and variable light chains are provided in Table 20. Each of the humanized VH domain sequences (SEQ ID NOs: 307, 308, 309, 310 and 312) was appended to the human CH1-hinge-CH2-CH3 domain sequence of IGHG1*01 (SEQ ID NO: 318) to provide five humanized 8K22 full heavy chain sequences. Each of the humanized VL domain sequences (SEQ ID NOs: 313, 314, 315, 316 and 317) was appended to tie human kappa CL sequence of IGKC*01 (SEQ ID NO:67) to provide five humanized 8K22 light chain sequences. In a similar manner, 8K22 rabbit-human parental antibody chimera heavy and light chain sequences were assembled, with the difference that variable domain sequences were rabbit (SEQ ID NOs:298 (VH) and 299 (VL)) and constant domain sequences were human (SEQ ID NOs: 318 (CH1-hinge-CH2-CH3 chain) and 67 (CL sequence of IGKC*01)). These sequences were reverse translated to DNA, codon optimized for mammalian expression and gene synthesized. The humanized VH and VL sequences are provided in Table 20.

[0692] Heavy chain vector inserts comprising a signal peptide (artificially designed sequence: MRPTWAWWLFLVLLLALWAPARG (SEQ ID NO:1) (Barash er al., (2.002), Biochem and Biophys Res. Comm., 294:835-842)) and the heavy chain clone terminating at G446 (EU numbering) of CH3 were ligated into a pTT5 vector to produce heavy chain expression vectors. Light chain vector inserts comprising the same signal peptide were ligated into a pTT5 vector to produce light chain expression vectors. The resulting heavy and light chain expression vectors were sequenced to confirm correct reading frame and sequence of the coding DNA.

[0693] The heavy and light chains of the antibody variants were expressed in 400 ml cultures of CHO-3E7 cells. Briefly, CHO-3E7 cells, at a density of 1,7-2×10⁶ cells/ml, viability >95%, were cultured at 37° C. in FreeStyle™ F17 medium (ThermoFisher, Watham, Mass.) supplemented with 4 mM glutamine (GE Life Sciences, Marlborogh, Mass.) and 0.1% Pluronic® F-68 (Gibco, Life Technologies), A total volume of 400 ml was transfected with a total of 400 ug DNA (200 ug. of antibody DNA and 200 ug of GFP/AKT/stuffer DNA) using PEI-max (Polyscience, Philadelphia, Pa.) at a DNA:PEI ratio of 1:4 (W/W). Twenty-four hours after the addition of the DNA-PEI mixture, 0.5 mM valproic acid (final concentration)+1% w/v Tryptone (final concentration)+1× antibiotic/antimycotics (GE Life Sciences, Marlborogh, Mass.) were added to the cells, which were then transferred to 32° C. and incubated for 9 days prior to harvesting. The parental 8K22 rabbit-human antibody chimera was expressed in a similar manner in a 1 L culture.

[0694] Clarified supernatant samples were incubated in batch with mAb Select SuRe resin (GE Healthcare, Chicago, Ill.) cleaned-in-place (CIP'd) with NaOH and equilibrated in Dulbecco's PBS (DPBS). Resin was poured into CIP'd columns, the columns were washed with DPBS and protein eluted with 100 mM sodium citrate buffer pH 3,0. The eluted fractions were pH adjusted by adding 10% (v/v) 1M HEPES pH 8 to yield a final pH of 6-7. Samples were buffer exchanged into PBS and aseptically filtered. Protein was quantitated based on absorbance at 280 nm (A280 nm) (in instances where precipitation was present upon sample neutralization, these samples were centrifuged briefly prior to A280 nm measurements). Endotoxin levels were determined using the Endosafe® Portable system (Charles River, Wilmington, Mass.). Samples having endotoxin above 0.2 EU/mg underwent endotoxin removal with the NoEndo™ Spin columns (Viva Products Inc., Littleton, Mass.). Parental 8K22 rabbit-human antibody chimera variant was further purified by preparatory SEC chromatography (Superdex 200 26/60) in DPBS mobile phase following protein-A purification.

[0695] Following purification, purity of samples was assessed by non-reducing and reducing High Throughput Protein Express assay using Caliper LabChip® GXII (Perkin Elmer, Waltham, Mass.). Procedures were carried out according to HT Protein Express LabChip® User Guide version 2 with the following modifications. Antibody samples, at either 2 μl or 5 μl (concentration range 5-2000 ng/μl), were added to separate wells in 96 well plates (BioRad, Hercules, Calif. ) along with 7 μl of HI Protein Express Sample Buffer (Perkin Elmer #4760328). Antibody samples were then denatured at 70° C. for 15 mins. The LabChip® instrument was operated using the HT Protein Express Chip (Perkin Elmer, Waltham, Mass.) and the Ab-200 assay setting.

### Results

[0696] Yield post protein-A purification across the twenty-five humanized 8K22 antibody variants ranged from ˜10-30 mg (or 25-75 mg/L ). FIG. 30B and 30D shows the Caliper result for the parental chimeric antibody v23820 and a representative humanized variant, v23807. As shown in FIG. 30D, on a representative humanized antibody sample, non-reducing (NR) and reducing (R) Caliper reflected a single species corresponding to full-size antibody and intact heavy and light chains, which was the case with all humanized variants. Small levels of precipitation were observed upon sample neutralization following protein-A elution, for the following variants: 23804, 2805, 23807, 23808, 23814, 23816, 23817, 23818, including the parental chimera, v23820. Comparison with protein samples of similar titers that did not result in any precipitation, suggested that levels of precipitation observed were relatively negligible, since the resulting yields for these two types of samples were comparable. Some of the humanized 8K22 antibody samples required endotoxin removal following protein-A purification. Endotoxin removal was carried out for two out of twenty-five humanized 8K22 antibody samples and resulted in successful reduction of endotoxin levels to the necessary specifications.

### Example 26

### Quality Assessment of Purified Humanized 8K22 Antibodies

[0697] Samples of humanized 8K22 antibody variants were subjected to UPLC-SEC in order to assess species homogeneity following protein-A purification or following preparatory SEC purification in the case of parental chimera antibody, v23820.

[0698] UPLC-SEC was performed using a Waters Acquity BEH200 SEC column (2.5 mL, 4.6×150 mm, stainless steel, 1.7 μm particles) (Waters LTD, Mississauga, ON) set to 30° C. and mounted on a Waters Acquity UPLC H-Class Bio system with a photodiode array (PDA) detector. Run times consisted of 7 min and a total volume per injection of 2.8 mL with a running buffer of DPBS with 0.02% Tween 20 pH 7.4 at 0.4 mL/'min, Elution was monitored by UV absorbance in the range 210-500 nm, and chromatograms were extracted at 280 nm. Peak integration was performed using Waters Empower 3 software.

### Results

[0699] As shown in FIGS. 30A (for the parental chimera v23820) and 30C (for a representative humanized antibody), UPLC-SEC profile for the representative humanized antibody sample reflected high species homogeneity, comparable to the purified parental chimera antibody sample. The parental chimera contained higher molecular weight species following protein-A purification (not shown), which were removed by preparatory SEC. The rest of the humanized 8K22 antibody samples had similar profiles to those of the representative humanized antibody sample.

### Example 27

### Affinity Assessment of Humanized 8K22 Antibodies for hFRα

[0700] To determine whether the humanization process affected the affinity of the humanized variants for their target, the ability of the humanized 8K22 antibody variants to bind the hFRα antigen was assessed by Bio-layer interferometry (BLI).

[0701] Supernatant material post-harvest was screened for binding to the hFRα, followed by the binding assay repeat on the purified antibody samples for selected variants.

[0702] Antigen binding was assessed using the Octet RED96 system by cycling through the following steps: loading of antibodies (0.9 μg/mL) onto AHC biosensors over 200 s; stabilization of baseline for 60 s; association to recombinant His-tagged human FRα (Acrobiosystem) at multiple relevant concentrations spanning the expected KD for 500 s; dissociation was recorded for 1200 s; and regeneration was performed by cycling 3 times between 10 mM glycine pH 1.5 (15 s) and the assay buffer (15 s) before proceeding to the next antibody. The assay buffer used was KB buffer (kinetics buffer, composed of PBS pH 7.4, 0.1% BSA, 0.02% Tween 20, 0.05% sodium azide) supplemented with 0.06% Tween 20. The experiment was conducted at 25° C. with a shake speed of 1000 rpm.

[0703] Data analysis was performed using the Data analysis software 9.0′ (ForteBio). The reference-subtracted binding curves were globally fitted to the 1:1 interaction model to generate the binding kinetic parameters kₒₙ, k_{off}, and the dissociation constant KD.

### Results

[0704] The results are shown in Table 21 and FIG. 31. FIG. 31A shows the BLI sensorgrams for the parental chimeric antibody v23820, and two representative humanized antibodies, v23801 and v23807 using supernatants. FIG. 31B shows the BLI sensorgrams for the parental chimeric antibody v23820, and two representative humanized antibodies, v23801 and v23807 using purified antibodies. Screening of antibody supernatants for binding to hFRα distinguished a top group (Group A) of humanized 8K22 antibody variants (variants 23798, 23804, 23806, 23807, 23809, 23814, 23816 and 23817) with minor reduction in affinity, within 2-fold, compared to that of the parental chimera antibody. Obtained KD values ranged from ˜14 nM to 9.3nM, with KD of the parental chimera antibody (variant 23820) determined to be 5.9 nM. The majority of the humanized 8K2.2 antibody variants were characterized by greater than 2-fold and up to 4-fold reduced affinity compared to that of the parental chimera mAb; these are referred to as Group B variants. Variants 23795, 23800, 23810, 23803 and 23813 exhibited a further decrease in affinity. ˜5-6 fold compared to the parental chimera mAb; these variants are referred to as Group C variants. Differences in determined KD values between humanized 8K22 antibody variants primarily stemmed from differences in K_{off} values.

[0705] BLI binding assay on purified antibody samples was consequently performed for the variants that exhibited up to ˜4-fold reduction in affinity as determined in the assay performed on the supernatant material. Absolute KD values obtained in this assay, performed on purified material, were systematically lower than those obtained in the assay performed on the supernatant material, due to higher Kₒₙ values (K_{off} values were largely comparable to those obtained in the assay performed on the supernatant material), however the relative ranking of 8K22 humanized variants was very similar. Differences in the placement within Groups A, B and C were observed for variants 23809 and 23816 (from Group A to Group B), as well as for the variants 23794 and 23818 (from Group B to Group A).

[0706] Variants 23804, 23806, 23807, 23814 and 23817 emerged as the top tier performing variants, with respect to the retention of the affinity to liFRα within 2-fold upon humanization, as determined by both binding assays, performed on supernatant and purified sample material. These variants have L3 or L5 humanized light chains in common, which differ fr©m the rest of the three humanized light chains by the presence of the two amino acid back substitutions to rabbit residues in the FR loop. Data obtained in these binding assays suggests that these two particular amino acid residues are important for retaining parental chimera-like antigen binding affinity in humanized variants. Secondary determinants of the top tier antibody variants that emerged are the presence of H1 or H4 humanized heavy chains.

### Example 28

### Thermal Stability Assessment of Humanized 8K22 Antibodies

[0707] The thermal stability of humanized 8K22 antibody variants was assessed by differential scanning calorimetry (DSC) as described below.

[0708] 400 μL of purified samples primarily at concentrations of 0.4 mg/mL in PBS were used for DSC analysis with a VP-Capillary DSC (GE Healthcare, Chicago, Ill.). At the start of each DSC run, 5 buffer blank injections were performed to stabilize the baseline, and a buffer injection was placed before each sample injection for referencing. Each sample was scanned from 20° C. to 100° C. at a 60° C./hr rate, with low feedback, 8 sec filter, 3 min pre-scan thermostat, and 70 psi nitrogen pressure. The resulting thermograms were referenced and analyzed using Origin 7 software (OriginLab Corporation, Northampton, Mass.) to determine melting temperature (Tm) as an indicator of thermal stability.

### Results

[0709] Fab Tm values were determined for the humanized 8K22 antibody variants that exhibited lower than ˜5-6-fold reduction in antigen affinity compared to the parental chimera antibody. Determined Fab Tm values for the characterized humanized variants, were comparable or up to 10° C. higher than that of the parental chimera antibody, ranging from ˜70° C. to 81.0° C. (Table 22). As can be seen in Table 22 and FIG. 32 (thermograms of representative variants), aside from commonly observed single transition profiles (FIG. 32A) humanized 8K22 antibody variants (variants 23796, 23798, 23801 and 23818) exhibited two-state transition profiles (FIG. 32B) and some exhibited weakly pronounced two-state transition profiles (variants 23802, 23814, 23815, 23816, 23817) (FIG. 32B). Whereas such profiles are not generally characteristic of kappa Fabs, they are sometimes Observed and are likely reflective of uncooperative melting of Fab domain, i.e. constant and variable domains unfolding separately.

[0710] Humanized variants with the lowest determined Fab Tm values have in common presence of the two amino acid back substitutions to rabbit residues in the FR loop of the humanized light chain, whereas the variants with the highest Tm values have in common the amino acid back substitution to rabbit residue at a position in the variable domain of the humanized light chain that is in contact with the constant domain of that chain. No particular trends were identified in terms of the particular heavy and light chain composition of the variants that could explain the differences in the transition profiles (single or two-state) observed between some of the variants.

### Example 29

### Purity Assessment of Humanized 8K22 Antibodies

[0711] The apparent purity of the antibody variants was assessed using mass spectrometry after protein A purification (Example 25) and non-denaturating deglycosylation.

[0712] As the antibody variant samples contained Fc N-linked glycans only, the samples were treated with only one enzyme, N-glycosidase F (PNGase-F). The purified samples were de-glycosylated with PNGaseF as follows: 0.1U PNGaseF/μg of antibody in 50 mM Tris-HCl pH 7.0, overnight incubation at 37° C., final protein concentration of 0.48 mg/mL. After deglycosylation, the samples were stored at 4° C. prior to LC-MS analysis.

[0713] The deglycosylated protein samples were analyzed by intact LC-MS using an Agilent 1100 HPLC system coupled to an LIQ-Orbitrap™ XL mass spectrometer (ThermoFisher, Waltham, Mass.) (tuned for optimal detection of larger proteins (>50 kDa)) via an Ion Max electrospray source. The samples were injected onto a 2.1×30 mm Koros R2 reverse phase column (Applied Biosystems) and resolved using a 0.1% formic acid aq/acetonitrile (degassed) linear gradient consisting of increasing concentration (20-90%) of acetonitrile. The column was heated to 82.5° C. and solvents were heated pre-column to 80° C. to improve protein peak shape. The cone voltage (source fragmentation setting) was approximately 40 V, the FT resolution setting was 7,500 and the scan range was m/z 400-4,000. The LC-MS system was evaluated for IgG sample analysis using a deglycosylated IgG standard (Waters IgG standard) as well as a deglycosylated mAb standard mix (25:75 half:full sized mAb). For each LC-MS analysis, the mass spectra acquired across the antibody peak (typically 3.6-4.3 minutes) were summed and the entire multiply charged ion envelope (m/z 1,400-4,000) was deconvoluted into a molecular weight profile using the MaxEnt 1 module of MassLynx, the instrument control and data analysis software (Waters, Milford, Mass.). The apparent amount of each antibody species in each sample was determined from peak heights in the resulting molecular weight profiles.

### Results

[0714] All characterized humanized 8K22 antibody variants were of 100% species purity, exemplified by the LC/MS profile of the two representative humanized antibody samples in FIG. 33. FIG. 33A depicts the LC/MS profile for v23801, while FIG. 33B depicts the LC/MS profile for v23807. In LC/MS profiles of all samples, a peak at ˜+422 Da was present. This peak also was observed in the standard sample run, suggesting it may be a system contaminant and not a sample contaminant.

### Example 30

### Conversion of Fab 8K22 to scFv

[0715] The VH and VL sequences of the humanized anti-human folate receptor alpha (anti-hFRα) antibody 8K22 variant 23807 (H4L3), described in Examples 24 and 25, was converted from Fab format to scFv format as described below. This was done to facilitate the production of anti-4-1BB×anti-FRα bispecific antibodies in the 2×1 format described in Example 1 and FIG. 2B.

Design of 8L22 scFvs

[0716] A number of 8K22 says were designed in which the order of the VH and VL domains was varied, the length of the linker between the two domains was varied, or the effect of including a stabilizing disulfide bridge was assessed. The 8K22 scFvs were prepared and tested in one-armed antibody format as described in Example 1 and FIG. 1C. For most designs, the 8K22 scFvs were fused to the C-terminus of the Fc, but in some cases the 8K22 scFvs were fused to the N-terminus of the Fc. A summary of the 8K22 scFvs designed is found in Table 23. The sequences for the 8K22 say portion of each variant is found in Table 27 in Example 32.

TABLE 23
scFv conversion

| | | | | Di- | Fc |
|---|---|---|---|---|---|
| Antibody | | Orien- | | sul- | Fu- |
| Variant | Description | tation | Linker | fide | sion |
| v29675 | N-term Parent Fab | Parent | | | N- |
| | | Fab | | | |
| v29686 | C-term Parent Fab | C-term | | | C- |
| | | Fab | | | |
| v29676 | N-term VL-(short)-VH | VL-VH | (G₄S)₃ | | N- |
| v29677 | N-term VL-(long)-VH | VL-VH | (G₄S)₄ | | N- |
| v29678 | C-term VL-(short)-VH | VL-VH | (G₄S)₃ | | C- |
| v29679 | C-term VH-(short)-VL | VH-VL | (G₄S)₃ | | C- |
| v29680 | C-term VL-(long)-VH | VL-VH | (G₄S)₄ | | C- |
| v29681 | C-term VH-(long)-VL | VH-VL | (G₄S)₄ | | C- |
| v29682 | C-term VL-(short)-VH + | VL-VH | (G₄S)₃ | Yes | C- |
| | disulphide | | | | |
| v29683 | C-term VH-(short)-VL + | VH-VL | (G₄S)₃ | Yes | C- |
| | disulphide | | | | |
| v29684 | C-term VL-(long)-VH + | VL-VH | (G₄S)₄ | Yes | C- |
| | disulphide | | | | |
| v29685 | C-term VH-(long)-VL + | VH-VL | (G₄S)₄ | Yes | C- |
| | disulphide | | | | |

[0717] In more detail, humanized 8K22 variable light (VL) and variable heavy (VH) domains were converted to an scFv as follows: The VL (SEQ ID NO: 316) and VH (SEQ ID NO: 310) amino acid sequences were generated according to Kabat definitions. The VL and VH sequences were combined as a single sequence separated by a short linker sequence. The linker sequence was either (G₄S)₃ (short, GGGGSGGGGSGGGGS. SEQ NO:320) or (G₄S)₄ (long, GGGGSGGGGSGGGGSGGGGS, SEQ NO:321). The order of the domains was either VL-linker-VH or VH-linker-VL (see “Orientation” column in Table 23) where VL-VH indicates the VL sequence precedes the VH sequence and is connected by a short linker. VH-VL indicates the VH sequence precedes the VL sequence and is connected by a short linker. A stabilization disulfide between the VL and VH was introduced in some variants at position VL-G100C and VH-G44C according to the Kabat numbering system. This is denoted in Table 23 under the Disulfide column with Yes. The scFv designs used are described in table 23. For example, v29683 C-term VH-(short)-VL+disulphide is fused to the C-terminus of the Fc by the VH domain, followed by a (G₄S)₃ linker, and VL domain. The VH and VL domain contain a disulfide bond at VL-G100C and VH-G44C. The variants were constructed in a One-armed format generated using the heterodimeric Fc design described in Example 17.

[0718] Each of the 8K22 scFv sequences described in Table 23 were fused to an Fc sequence having the Het FcA mutations, as described in Example 17, at either the N-terminus or C-terminus. If fused to the N-terminus of Het FcA a short Ala-Ala linker was included between the scFv and the hinge of Het FcA. If fused to the C-terminus of the Het FcA a short Gly-Gly-Gly-Gly (SEQ ID NO:336) linker was included between the Het FcA and the scFv. in all constructs the cysteine located in the upper hinge at position Kabat: 233 was mutated to SER. These sequences were reverse translated to DNA, codon optimized for mammalian expression, and gene synthesized.

[0719] All parent (humanized 8K22) and scFv converted sequences were preceded by the artificially designed signal peptide sequence MRPTWAWWLFLVLLLALWAPARG [SEQ ID NO:1] (ref: Barash S et al., Biochem and Biophys Res. Comm, 2002; 294, 835-842). For all parental and scFv converted chains, vector inserts were prepared as described in Example 1 and cloned into the pTT5 expression vector.

### Example 31

### Production of Fc-Fused 8K22 ScFv Variants

[0720] Variants described in Example 30 were prepared under transient mammalian expression conditions and subsequently purified and characterized for stability and antigen binding. Samples of Fc-fused 8K22 scFv variants post protein-A were subjected to UPLC-SEC to assess the amount of high molecular species. Further, thermal stability of 8K22 scFv in Fc-fused 8K22 scFv variants was assessed by differential scanning calorimetry (DSC) as described below. This was performed to identify the optimal design for an 8K22 scFv.

### Method

[0721] The two different heavy chains in Fc-fused scFv variants and heavy and light chains in Fab containing (29675 and 29686) antibody variants were co-expressed in 200 mL CHO cultures and purified as described in Example 1. Following protein-A purification, purity of samples was assessed by non-reducing and reducing High Throughput Protein Express assay (LabChip) as described in Example 1.

[0722] Post protein-A purification, samples were either buffer exchanged into DPBS (Dulbecco's PBS) and aseptically filtered or, depending on their homogeneity assessed by UPLC-SEC, subjected to SEC purification as described in Example 1. UPLC-SEC was performed as described in Example 1.

[0723] Final purified samples were analyzed with DSC to determine their thermal stability. DSC experiments were performed as described in Example 14.

### Results

[0724] Yields of variant post protein-A were in the range of 85-109 mg/L for the Fc-fused 8K22 scFv variants. Non-reducing and reducing LabChip post protein-A reflected a predominant species of the desired molecular weight.

[0725] As can be seen on Table 24, UPLC-SEC profiles showed a variety of homogeneity in the different variants. Some variants contained high molecular weight (HWM) species (ie dimers, trimers, higher order aggregates) of up to 56%, v29676. Variants with a (G₄S)₄ linker (v29677, v29680 and v29681) had the lowest measured HMW species, 21-34%. With v29680 having the lowest measured HMW species at 21.8% All samples had the HMW species removed with preparative SEC.

TABLE 24
High molecular weight species in Fc-fused 8K22 scFv samples

| Antibody | | Yield post | HWM species |
|---|---|---|---|
| Variant | Description | Protein A (mg/L) | Post Protein A |
| v29675 | N-term Parent Fab | 100.3 | 10.1% |
| v29676 | N-term VL-(short)-VH | 86 | 56.5% |
| v29677 | N-term VL-(long)-VH | 85.3 | 34.4% |
| v29678 | C-term VL-(short)-VH | 102.4 | 55.4% |
| v29679 | C-term VH-(short)-VL | 108.3 | 43.6% |
| v29680 | C-term VL-(long)-VH | 100.7 | 21.8% |
| v29681 | C-term VH-(long)-VL | 105.8 | 27.5% |
| v29682 | C-term VL-(short)-VH + | 98.4 | 48.5% |
| | disulphide | | |
| v29683 | C-term VH-(short)-VL + | 103.3 | 48.6% |
| | disulphide | | |
| v29684 | C-term VL-(long)-VH + | 107.4 | 40.2% |
| | disulphide | | |
| v29685 | C-term VH-(long)-VL + | 96.8 | 43.9% |
| | disulphide | | |

[0726] FIG. 34 shows the DSC thermograms of the Fc-fused 8K22 scFv antibodies tested. The Tm values, corresponding to the scFv portion of the Ab, determined from the thermograms are shown in Table 25 below.

TABLE 25
Thermal stability of 8K22 scFv in Fc-fused variants

| Antibody | | |
|---|---|---|
| Variant | Description | Tm (° C.) |
| v29675 | N-term Parent Fab | 71.5 |
| V29686 | C-term Parent Fab | 74.7 |
| v29676 | N-term VL-(short)-VH | 54.8 |
| v29677 | N-term VL-(long)-VH | 57.0 |
| v29678 | C-term VL-(short)-VH | 53.5 |
| v29679 | C-term VH-(short)-VL | 50.3 |
| v29680 | C-term VL-(long)-VH | 56.4 |
| v29681 | C-term VH-(long)-VL | 52.9 |
| v29682 | C-term VL-(short)-VH + | 58.4 |
| | disulfide | |
| v29683 | C-term VH-(short)-VL + | 60.4 |
| | disulfide | |
| v29684 | C-term VL-(long)-VH + | 60.0 |
| | disulfide | |
| v29685 | C-term VH-(long)-VL + | 59.3 |
| | disulfide | |

[0727] Each peak on the thermogram corresponds to a thermal transition. There are three expected thermal transitions: Fab/scFv, CH2 (˜71° C.) and CH3 (˜80° C.). The transition of the Fab reflects cooperative melting of the VH-VL and CH1-CL domains. The expected transition of the say would correspond to the melting of the VH-VL domains. Some scFvs do not undergo cooperative melting and two transitions were observed. In these cases the lower Tm is reported in Table 25. The 8K22 Fab transition overlaps with the CH2 domain transition and therefore only 2 transition peaks are observed in the thermogram for 8K22 parent Fab antibody variants. As can be seen in FIG. 34, three distinct transitions can be observed for all variants which contain a 8K22 scFv. The Tm of the 8K22 scFv was 10-15° C. lower than the parent Fab antibody. The engineered disulfide bond increases the Tm of the scFv between 1-6.5° C. Of the scFvs having a disulfide bond, the scFv of v29683 and v29684 had the highest thermal stability. Of the scFvs without a disulfide bond, the scFv of v29679 had the highest thermal stability.

### Example 32

### Binding of Fc-Fused 8K22 scFv Antibodies to Human FRα by Bio-Layer Interferometry

[0728] To assess the ability of the Fc-fused 8K22 scFv antibodies to retain Fab-like binding to human FRα, the affinity of scFv converted antibodies described in Example 31 were compared to the parental chimeric antibodies described in Examples 24 and 25 by Bio-layer interferometry (BLI).

[0729] Post SEC protein material described in Example 31 was assessed for binding to human FRα. Binding was measured by Bio-laver interferometry (BLI) using the Octet RED 96 (ForteBio) as described in Example 27. All parameters remained the same except for the dissociation phase which was recorded for 1500 s.

### Results

[0730] The KDs measured for each Fc-fused 8K22 scFv variant are provided in Table 26.

TABLE 26
Binding of Fc-fused 8K22 scFv variants to hFRα

| Antibody | | Binding Results (n = 2) | |
|---|---|---|---|
| Variant | Description | KD(M) | STDev KD (M) |
| v29675 | N-term Parent Fab | 4.1E−9 | 8E−11 |
| v29676 | N-term VL-(short)-VH | 3.9E−9 | 9E−11 |
| v29677 | N-term VL-(long)-VH | 5.0E−9 | 1E−10 |
| v29678 | C-term VL-(short)-VH | 5.1E−9 | 1E−10 |
| v29679 | C-term VH-(short)-VL | 3.9E−10 | 5E−11 |
| v29680 | C-term VL-(long)-VH | 1.8E−9 | 7E−11 |
| v29681 | C-term VH-(long)-VL | 2.6E−9 | 7E−11 |
| v29682 | C-term VL-(short)-VH + | 2.1E−9 | 8E−11 |
| | disulfide | | |
| v29683 | C-term VH-(short)-VL + | 1.1E−9 | 5E−11 |
| | disulfide | | |
| v29684 | C-term VL-(long)-VH + | 8.8E−10 | 1E−10 |
| | disulfide | | |
| v29685 | C-term VH-(long)-VL + | 4.2E−9 | 4E−10 |
| | disulfide | | |

[0731] As can be seen from Table 26, the BLI binding assay performed on the Fc-fused 8K22 scFv variants revealed that all say variants bound to hFRα with an affinity that was within 2-fold of the Parent Fab antibody. FIG. 35 provides BLI sensorgrams for the Parent Fab antibody (FIG. 35A) and two representative Fc-fused scFv variants (FIG. 35B and 35C) that were able to bind human FRα. These results suggest that the conversion to the scFv format and addition of the disulfide bond did not impact the binding to the antigen and that the location of the scFv, N-term or C-term, also had no effect on binding.

TABLE 27
8K22 scFv amino acid sequences of variants

| SEQ | | |
|---|---|---|
| ID | | |
| NO: | Variant | 8K22 scFv Sequence |
| 334 | v29676, | DIQMTQSPSSLSASVGDRVTITCQASQSIYSSLAWYQQKP |
| | v29678 | GKAPKLLIYDASHLASGVPSRFSGSRYGTDFTLTISSVQP |
| | | EDFATYYCQGGWYSSAATYVPNTFGGGTKVEVKGGGGSGG |
| | | GGSGGGGSEVQLVESGGGLVQPGGSLRLSCAASGFTISNN |
| | | YYMCWVRQAPGKGLEWIACIYGGISGRTYYADSAKGRFTI |
| | | SKDSSNTVYLQMNSLRAEDTAVYYCVRGYVGTSNLWGQGT |
| | | LVTVSS |
| 335 | v29677, | DIQMTQSPSSLSASVGDRVTITCQASQSIYSSLAWYQQKP |
| | v29680 | GKAPKLLIYDASHLASGVPSRFSGSRYGTDFTLTISSVQP |
| | | EDFATYYCQGGWYSSAATYVPNTFGGGTKVEVKGGSGGGS |
| | | GGGSGGGSGGGSGEVQLVESGGGLVQPGGSLRLSCAASGF |
| | | TISNNYYMCWVRQAPGKGLEWIACIYGGISGRTYYADSAK |
| | | GRFTISKDSSNTVYLQMNSLRAEDTAVYYCVRGYVGTSNL |
| | | WGQGTLVTVSS |
| 337 | v29679 | EVQLVESGGGLVQPGGSLRLSCAASGFTISNNYYMCWVRQ |
| | | APGKGLEWIACIYGGISGRTYYADSAKGRFTISKDSSNTV |
| | | YLQMNSLRAEDTAVYYCVRGYVGTSNLWGQGTLVTVSSGG |
| | | GGSGGGGSGGGGSDIQMTQSPSSLSASVGDRVTITCQASQ |
| | | SIYSSLAWYQQKPGKAPKLLIYDASHLASGVPSRFSGSRY |
| | | GTDFTLTISSVQPEDFATYYCQGGWYSSAATYVPNTFGGG |
| | | TKVEVK |
| 339 | v29681 | EVQLVESGGGLVQPGGSLRLSCAASGFTISNNYYMCWVRQ |
| | | APGKGLEWIACIYGGISGRTYYADSAKGRFTISKDSSNTV |
| | | YLQMNSLRAEDTAVYYCVRGYVGTSNLWGQGTLVTVSSGG |
| | | SGGGSGGGSGGGSGGGSGDIQMTQSPSSLSASVGDRVTIT |
| | | CQASQSIYSSLAWYQQKPGKAPKLLIYDASHLASGVPSRF |
| | | SGSRYGTDFTLTISSVQPEDFATYYCQGGWYSSAATYVPN |
| | | TFGGGTKVEVK |
| 340 | v29682 | DIQMTQSPSSLSASVGDRVTITCQASQSIYSSLAWYQQKP |
| | | GKPKLLIYDASHLASGVPSRFSGSRYGTDFTLTISSVQPE |
| | | DFATYYCQGGWYSSAATYVPNTFGCGTKVEVKGGGGSGGG |
| | | GSGGGGSEVQLVESGGGLVQPGGSLRLSCAASGFTISNNY |
| | | YMCWVRQAPGKCLEWIACIYGGISGRTYYADSAKGRFTIS |
| | | KDSSNTVYLQMNSLRAEDTAVYYCVRGYVGTSNLWGQGTL |
| | | VTVSS |
| 341 | v29683 | EVQLVESGGGLVQPGGSLRLSCAASGFTISNNYYMCWVRQ |
| | | APGKCLEWIACIYGGISGRTYYADSAKGRFTISKDSSNTV |
| | | YLQMNSLRAEDTAVYYCVRGYVGTSNLWGQGTLVTVSSGG |
| | | GGSGGGGSGGGGSDIQMTQSPSSLSASVGDRVTITCQASQ |
| | | SIYSSLAWYQQKPGKAPKLLIYDASHLASGVPSRFSGSRY |
| | | GTDFTLTISSVQPEDFATYYCQGGWYSSAATYVPNTFGCG |
| | | TKVEVK |
| 342 | v29684 | DIQMTQSPSSLSASVGDRVTITCQASQSIYSSLAWYQQKP |
| | | GKAPKLLIYDASHLASGVPSRFSGSRYGTDFTLTISSVQP |
| | | EDFATYYCQGGWYSSAATYVPNTFGCGTKVEVKGGSGGGS |
| | | GGGSGGGSGGGSGEVQLVESGGGLVQPGGSLRLSCAASGF |
| | | TISNNYYMCWVRQAPGKCLEWIACIYGGISGRTYYADSAK |
| | | GRFTISKDSSNTVYLQMNSLRAEDTAVYYCVRGYVGTSNL |
| | | WGQGTLVTVSS |
| 343 | v29685 | EVQLVESGGGLVQPGGSLRLSCAASGFTISNNYYMCWVRQ |
| | | APGKCLEWIACIYGGISGRTYYADSAKGRFTISKDSSNTV |
| | | YLQMNSLRAEDTAVYYCVRGYVGTSNLWGQGTLVTVSSGG |
| | | SGGGSGGGSGGGSGGGSGDIQMTQSPSSLSASVGDRVTIT |
| | | CQASQSIYSSLAWYQQKPGKAPKLLIYDASHLASGVPSRF |
| | | SGSRYGTDFTLTISSVQPEDFATYYCQGGWYSSAATYVPN |
| | | TFGCGTKVEVK |

### Example 33

### Generation of 4-1BB×FRα Bispecific Antibodies Utilising Humanized Paratopes

[0732] Additional 4-1BB×FRα antibody constructs (antibodies) v31330, v31331, v31332, v31333, v31334, and v31335 were designed to assess the effect of format on the ability of these 4-1BB×I FRα bispecific constructs to conditionally activate 4-1BB. FIG. 36 provides a representation of the formats of the antibodies tested in this example. These 4-1BB×FRα antibody constructs were prepared using the humanised anti-4-1BB paratope 1G1 corresponding to variant 28684 (H1L2), described in Example 10, and the anti-FRα humanised paratope 8K22 based on variant 23807 (H4L3) converted into an scFv, described in Example 30. Table X1 identifies the clones that make up each of the antibody constructs. The polypeptide sequences of each clone can be found in Table Y1.

[0733] Antibodies were expressed and purified as described in Example 1. Purified antibodies were then tested as described in subsequent examples.

### Example 34

### Activity of Humanised 4-1BB×FRα Bispecifics in a Primary T Cell Tumour Co-Culture Assay

[0734] The antibodies described in the previous example were tested in a primary T cell:tumour co-culture assay to assess their ability to activate 4-1:BB, according to methods previously described in Example 22. Briefly, CD8+ T cells were placed into wells of a 384-well plate with IGROV1 tumour cells and aAPC/CHO-K1 cells and samples of antibodies.

[0735] After four days, supernatants were taken and the concentration of IFNγ measured by MesoScale Discovery (MSD) U-Plex IFNγ 384-well assay kit (Meso Scale Diagnostics, Rockville, Md.). Prior to use, the MSD plates were blocked by adding 50 μl Diluent 100 (Meso Scale Diagnostics, Rockville, Md.) to wells of a MA6000 384-well SA plate for 30 minutes at room temperature. The blocking solution was then removed and 100 μl of capture antibody added to each well (228 μl of biotylated capture antibody diluted in 3.77 ml Diluent 100). The plate was left at 4° C. overnight, and then washed three times with PBS 0.05% Tween-20.

[0736] Tissue culture supernatant samples were diluted 1:20 with Diluent 43 (Meso Scale Diagnostics) and 5 μL of the diluted supernatant was placed into wells containing 5 μL of Diluent 43. The plate was left at room temperature for an hour to allow binding, then washed three times with PBS 0.05% Tween-20. SULFO-TAG IFNγ detection antibody (MesoScale Diagnostics) was diluted 100× in Diluent 3 and 10 μl of the resulting solution was added to each well, and the plate incubated for a further hour. The plate was then washed three times in PBS 0,05% Tween-20. 40 μl of MSD GOLD Read buffer was added to each well, and the plate read on a MesoSector 8600 instrument (MesoScale Diagonistics). The amount of IFNγ in each sample was calculated according to a standard curve generated from recombinant IFNγ (R&D System).

### Results

[0737] As can be seen from FIG. 37, 4-1BB×FRα bispecific antibodies showed induction of IFNγ in co-culture with IGROV1 cells. Samples v31332, v31362 and v31330 which have two 4-1BB binding domains showed both the highest potency and highest activity, as shown by the total production of IFNα, v31332, v31362 and v31330 also showed higher activity than v30335, a monospecific 4-1BB antibody that is not reliant on Fc-mediated crosslinking. Samples with only a single 4-1BB binding arm (v31333, v31334 and v31335) induced production of IFNγ in dose-dependent manner, but total production of cytokine was lower than seen for samples with two 4-1BB binding arms. v31331, despite having two 4-1BB binding domains, showed activity similar to antibodies with a single 4-1BB binding domain (v31333, v31334 and v31335), suggesting that the 4-1BB and FRα binding domains on the same arm of v31331 may result in a geometry that prevents engagement of both 4-1BB and FRα simultaneously, reducing activity to that seen with a single 4-1BB arm.

[0738] Two antibodies were used as control antibodies for non-specific activity. v16952, which does not bind mammalian proteins, and v31354, which contains the same 4-1BB binding domains and same format as v3I332 but does not bind FRα did not show any activity in this experiment, suggesting that the IFNg production seen in this experiment was due to 4-1BB costimulation and clustering of the 4-1BB antibody via FRα.

### Example 35: Activation of 44BB by 4-1BB×FRα Bispecific Antibodies in Co-Culture with Lung and Ovarian Cell Lines

[0739] The 4-1BB×FRα antibodies described in Example 33 were assessed for induction of 4-1BB signalling in co-culture with lung and ovarian cancer cell lines. The assay was carried out using the NFκB reporter gene assay described in Example 3, but with the tumour cell lines described in Table 28 below:

TABLE 28
Ovarian and lung cell lines

| Cell line | Source | Type | FRα level |
|---|---|---|---|
| IGROV1 | NCI | Ovarian endometrioid | FRα^{high} |
| | | Adenocarcinoma | |
| OVCAR3 | ATCC | Ovarian serous | FRα^{mid} |
| | | adenocarcinoma | |
| OVKATE | JCRB | Ovarian serous | FRα^{mid} |
| | | adenocarcinoma | |
| NCI-H441 | ATCC | Papillary lung | FRα^{mid} |
| | | adenocarcinoma | |
| NCI-H661 | ATCC | Large cell lung carcinoma | FRα^{low/neg} |
| NCI-H1975 | ATCC | Lung adenocarcinoma | FRα^{high} and FRα^{low} |
| | | | (heterogeneous) |
| HCC827 | ATCC | Lung adenocarcinoma | FRα^{low} |
| A431 | ATCC | Vulvar squamous cell | FRα^{low} |
| | | carcinoma | |

[0740] Cell lines were obtained from ATCC (Manassas, Va., USA), with the exception of OVKATE (Japanese Collection of Research Bioresources Cell Bank, Osaka, Japan) and IGROV1 (National Cancer institute, Bethesda, Md., USA). Cells were assigned as FRα^{high}, FRα^{mid} and FRα^{low} based on binding of v17717 directly conjugated to Alexa647 by flow cytometry, as described in Example 18.

### Results

[0741] Similar to previous experiments, IGROV1 cells in co-culture with Jurkat T cells with a 4-1BB NFκB reporter system showed activation by 4-1BB×FRα antibodies in a dose-dependent manner (FIG. 38A). 4-1BB×FRα antibodies with two 4-1BB binding domains v31332, v31330 and v31362) showed greater activity than antibodies only having a single 4-1BB binding domain (v31333, v31334 and v31335) (FIG. 38A-H). The exception was v31331, which has two 4-1BB binding domains but had similar activity to v31333, v31334 and v31335. v31331 may only be able to engage a single 4-1BB on the Jurkat at the same time as the FRα on the tumour cell, potentially due to the proximity of the 4-1BB and FRα binding pockets.

[0742] Activity on cell lines derived from patients with either Ovarian or Lung cancers were also tested. These cell lines also expressed different levels of FRα, enabling the examination of the effect of FRα level on activity. The maximal activity and potency were higher when the antibodies were in co-culture with FRα^{high} cells and correlated with levels of FRα on the surface of the tumour cells (FIG. 38A-H). However, the relative activity on the antibodies did not change, with the highest potency and activity seen from v31332, v31330 and v31362 compared to the other antibodies. Activity was also seen in co-culture with FRα-positive Ovarian and Lung cancer cell lines of diverse origin. On FRα^{low} cell lines, activity could be seen but was lower than seen with the monospecific 4-1BB antibody v30335.

### Example 36

### Ability of Selected Anti-4-1BB Paratopes to Bind to 4-1BB from Cynomolgus (Cyno) Monkeys

[0743] The ability of select humanized antibodies to bind cyno 4-1BB by SPR was assessed and compared to that of the parent mouse paratopes 1C8, 1G1, and 5G8. Cyno cross-reactivity of these antibodies had been assessed using a homogeneous cell binding assay as described in Example 9; in this experiment cyno cross-reactivity was assessed using SPR. The SPR method used was similar to the one described in Example 2, except that SEC-purified Cyno 4-1BB-His (Acro Biosystems) was used in place of the human 4-1BB. The antibodies tested are described in Table 29 below:

TABLE 29
Antibodies tested

| Variant | Paratope | Description |
|---|---|---|
| 20022 | 1C8 | Mouse VH and VL |
| 20023 | 1G1 | sequences, Example 6, |
| 20036 | 5G8 | Table 13 |
| 28727 | 1C8 | Humanized VH and VL |
| 28684 | 1G1 | sequences, Example 10, |
| 28704 | 5G8 | Table 14 |

### Results

[0744] Binding of cyno 4-1BB to both v20023 and v28684 was similar, suggesting that the 1G1 paratope bound cyno 4-1BB before and after humanization. The 1C8 paratope, similar to seen with human 4-1BB, lost some binding after humanization as can be seen in the difference between v20022 and v28727. In contrast to FIG. 11A where v20036 appeared to bind cyno 4-1 BB, by SPR v20036 binds poorly to cyno 4-1BB. The discrepancy between FIG. 11A and the data in FIG. 39 is likely due to the inability of the method used in FIG. 11A to discriminate between antibodies which bind well and antibodies which bind poorly to cyno 4-1BB.

[0745] Tables 13-22

TABLE 13
Recovered anti-human 4-1BB antibody sequences

| | Anti- | | |
|---|---|---|---|
| Variant | body | VH | VL |
| 20020 | 1B2 | QVQLQQPGAELVKPGASVKLSCKASGYT | DVVMTQTPLSLPVSLGDQASISCRSSQ |
| | | FTSFWINWVKQRPGQGLEWIGNIYPDSS | SIVHSNGNTYLEWYLQKPGQSPKLLIY |
| | | STNYNEKFKNKATLTVDTSSSTAYMQLS | KVSNRFSGVPDRFSARGSGTDFSLKIS |
| | | SLTSDDSAVYFCARSLTFDYWGQGTTLT | RVEAEDLGVYYCFQGSHVPYTEGGGTK |
| | | VSS [SEQ ID NO: 3] | LEIK [SEQ ID NO: 4] |
| 20021 | 1C3 | QVQLKQSGPGLVQPSQSLSITCTVSGFS | DVVMTQTPLSLPVSLGDQASISCRSSQ |
| | | LTSYGVHWVRQSPGKGLEWLGVIWRGGS | SIVHSNGNTYLEWYLQKPGQSPKLLIY |
| | | TDYNAAFISRLSISKDNSKSQVFFKMNS | KVSNRFSGVPDRFSARGSGTDFSLKIS |
| | | LQADDTAIYYCARENYDYDEFAYWGQGT | RVEAEDLGVYYCFQGSHVPYTEGGGTK |
| | | LVTVSA [SEQ ID NO: 5] | LEIK [SEQ ID NO: 6] |
| 20022 | 1C8 | QVQLKESGPGLVAPSQSLSITCTVSGFS | DIQMTQSTSSLSASVGDRVTISCSASQ |
| | | LTTYAISWVRQPPGKGLEWLGIIWPGGG | GISNYLNWYQQKPDGTVKLLIYYTSSL |
| | | TNYNSALKSRLSISKDNSRSQVFLKMNS | HSGVPSRFSGSGSGTDYSLTISNLEPE |
| | | LQTDDTARYYCARGAGTWYFDVWGAGTT | DIATYYCQQYSKFPWTFGGGTKLEIK |
| | | VTVSS [SEQ ID NO: 7] | [SEQ ID NO: 8] |
| 20023 | 1G1 | EVQLVESGGGLVKPGGSRKLSCAASGFT | NIVMTQSPKSMSMSVGERVTLSCKASE |
| | | FSEFGMHWVRQAPDKGLKWVAYISSGGS | NVGSYVSWYOQKPEKSPKLLIYGASNR |
| | | TIYYADTVKGRFTISRDNAKNTLFLQMT | YTGVPDRFTGSGSATDFTLTISSVQAE |
| | | SLRSEDTAMYYCARDWVDYWGQGTTLTV | DLADYHCGQSYSYPLTFGAGTKLELK |
| | | SS [SEQ ID NO: 9] | [SEQ ID NO: 10] |
| 20024 | 2A7 | EVQLQQSGPELVKPGASVKMSCKASGYT | DIVMTQSHKFMSTSVGDRVSITCKASQ |
| | | FTSYVMHWVKQKPGQGLEWIGYINPYND | DVGTAVGWYQQKLGQSPKLLIYWASTR |
| | | GTKYNEKFKGKATLTSDKSSSTAYMELS | RTGVPDRFTGSGSGTDFTLTISNVQSE |
| | | SLTSEDSAVYYCARLGSRGTWFAYWGQG | DLADYFCQQYSSYPLTFGAGTKLELK |
| | | TLVTVSA [SEQ ID NO: 11] | [SEQ ID NO: 12] |
| 20025 | 2E8 | QVQLKQSGPGLVQPSQSLSITCTVSGFS | DIVMTQSQKFMSTSVGDRVSVTCKASQ |
| | | LTSYGVHWVRQSPGKGLEWLGVIWSGGS | NVGTNVAWYQQKPGQSRTVLIYSASYR |
| | | TDYNAAFISRLSISKDNSKSQVFFKMNS | HSGVPDRFTGSGSGTDFTLTISNVQSE |
| | | LQADDTAIYYCARNPLTATVMDYWGQGT | DLAEYFCQQYNSYPLTEGTGTKLELK |
| | | SVTVSS [SEQ ID NO: 13] | [SEQ ID NO: 14] |
| 20026 | 2H9 | QVQLQQPGAELVRPGASVKLSCKASGYP | DIVMTQAAFSNPVTLGTSASISCRSSK |
| | | FTSYWMSWVKQRPEQGLEWIGRIDPYDS | SLLHSYGITYLYWYLQKPGQSPQLLIY |
| | | ETHYNQKFKDKAILTVDKSSSTAYMQLS | QMSNLASGVPDRFSSSGSGTDFTLRIS |
| | | SLTSEDSAVYYCARTYYGNYDAMDYWGQ | RVEAEDVGVYYCAQNLELPLTFGAGTK |
| | | GTSVTVSS [SEQ ID NO: 15] | LELK [SEQ ID NO: 16] |
| 20027 | 3D7 | QVQLQQPGAELVRPGASVKLSCKASGYT | QIVLTQSPAIMSASPGEKVTMTCSASS |
| | | FTSYWINWVKQRPGQGLEWIGNIYPSDN | SVSYMHWYQQKSGTSPKRWVYDTSKLA |
| | | YTNYNQKFKDKATLTVDKSSSTAYMQLS | SGVPARFSGSGSGTSYSLTISSMEAED |
| | | SPTSEDSAVYYCTRGGGIYYENYFDYWG | VATYYCOQWSSNPPTFGGGTKLEIK |
| | | QGTTLTVSS [SEQ ID NO: 17] | [SEQ ID NO: 18] |
| 20028 | 3H1 | QVHLQQSGSELRIPGSSVKLSCKDFDSE | DVVMTQTPLSLPVSLGDQASISCRSSQ |
| | | VFPIAYMSWVRQKPGHGFEWIGDILPSI | SLVHSNGNTYLHWYLQKPGQSPKLLIY |
| | | GRTIYGEKFEDKATLDADTVSNTAYLDL | KVSNRFFGVPDRFSGSGSGTDFTLKIS |
| | | NSLTSEDSAIYYCSRGDYYYGSREYAMD | RVEAEDLGVYFCSQTTYVPLTFGAGTK |
| | | YWGQGTSVTVSS [SEQ ID NO: 19] | LELK [SEQ ID NO: 20] |
| 20029 | 3E7 | QVQLQESGGGLVKPGGSRKLSCAASGFT | NIVMTQSPKSMSMSVGERVTLSCKASE |
| | | FSEFGMHWVRQAPDKGLEWVAYISSGSS | NVGSYVSWYQQKPEKSPKLLIYGASNR |
| | | TIYYADTVKGRFTISRDNAKNTLFLQMT | YTGVPDRFTGSGSATDFTLTISSVQAE |
| | | SLRSEDTAMYYCARDWVDYWGQGTALTV | DLADYHCGQSYSYPLTFGAGTKLELK |
| | | SS [SEQ ID NO: 21] | [SEQ ID NO: 10] |
| 20030 | 3G4 | QVQLKQSGPGLVQPSQSLSITCTVSGFS | DIVMTQSPSSLAVTAGEKVTMRCKSSQ |
| | | LTSYGVHWVRQSPGKGLEWLGVIWSGGS | SLLMSVNQNNYLSWYQQKQGQPPKLLI |
| | | TDYNGAFISRLSISKDNSKSQVFFKMNS | YGASIRESWVPDRFTGSGSGTDFTLTI |
| | | LQADDTAMYFCARDRGGGFDYWGQGTTL | SNVHAEDLAVYYCQHNHGSFLPYTFGG |
| | | TVSS [SEQ ID NO: 23] | GTKLEIK [SEQ ID NO: 24] |
| 20031 | 4B11 | QVQLQQSGPELVKPGASVKISCKASGYV | DVVMTQTPLSLPVSLGDQASISCRSSQ |
| | | FSSYWNNWVKQRPGKGLEWIGRIYPGNG | SLVHSNGNTYLHWYLQKPGQSPKLLIY |
| | | DTNYNGKFKDKATLTADKFSSTAYMQLS | KVSNRFFGVPDRFSGSGSGTDFTLKIS |
| | | NLTSEDSAVYFCASYYELDYWGQGTSVT | RVEAEDLGVYFCSQTTYVPLTFGAGTK |
| | | VSS [SEQ ID NO: 25] | LELK [SEQ ID NO: 26] |
| 20032 | 4E6 | QVQLKESGPGLVAPSQSLSITCTVSGFS | DIQMTQTTSSLSASLGDRVTFSCSASQ |
| | | LTSYAINWVRQPPGKGLEWLGVLWPGGG | GISNYLNWYQQKPDGTVKLLIYYTSSL |
| | | TNYNSALKSRLSISKDNSKSQVFLKMNS | HLGVPSRFSGSGSGTDYSLTISNLEPE |
| | | LQTDDTARYYCARGSGTWYFDVWGAGTT | DIATYYCQQYSKLPWTFGGGTKLEIK |
| | | VTVSS [SEQ ID NO: 27] | [SEQ ID NO: 28] |
| 20033 | 4F9 | QVQLQQPGAELVKPGASVMLSCKASGYT | NIVMTQSPKSMSMSVGERVTLSCKASD |
| | | FTSYWMHWVKQRPGQGLEWIGEINLRNG | NVGISVSWYQQKPEQSPKLLIYGASNR |
| | | GTNYYEKFKTRATLTVDKSSSTAYMQLS | YTGVPDRFTGTGSATDFTLTISSVQAE |
| | | SLTSEDSAVYYCTILTSAPSYWGQGTLV | DLADYHCGQSYSYPFTFGSGTKLEIK |
| | | TVSA [SEQ ID NO: 29] | [SEQ ID NO: 30] |
| 20034 | 4G10 | QLQESGAELLRPGASVKLSCTASGFNIK | DIVMTQAAFSNPVTLGTSASISCRSNK |
| | | DDYLHWVKQRPEQGLEWIGWIDPENGDT | SLLHSDGITYLFWYLQRPGQSPQLLIY |
| | | EYASKFQGKATIKADTSSNTAYLQLSSL | RMSNLASGVPDRFSGSGSGTDFTLRIS |
| | | TSEDTAVYYCSTQGFACWGQGTLVTVSA | RVEAEDVGVYYCAQMVEFPRTFGGGTK |
| | | [SEQ ID NO: 31] | LEIK [SEQ ID NO: 32] |
| 20035 | 5E2 | EVKLVESEGGLVQPGSSMKLSCTASGFT | DVLMTQTPLSLPVSLGDQASISCRSSQ |
| | | FSDYYMAWVRQVPEKGLEWVAHINYDGS | SIVHSNGNTYLEWYLQKPGQSPKLLIY |
| | | GTYYLDSLKGRFIISRDNAKNILYLQMS | KVSNRFSGVPDRFSGSGSGTDFTLKIS |
| | | SLKSEDTATYYCARDCYGSSSYAVDYWG | RVEAEDLGVYYOFQGSHVPWTFGGGTK |
| | | QGTSVTVSS [SEQ ID NO: 33] | LEIK [SEQ ID NO: 34] |
| 20036 | 5G8 | QVQLQESGPGLVQPTQSLSITCTVSGFS | DIVMTQSQKFMSTSVGDRVSVTCKASQ |
| | | LISYGVHWVRQSPGKGLEWLGVIWSGGS | NVGTNVAWYQQKPGQSPKALIYSASYR |
| | | TDYNAAFISRLSISKDNSKSQVFFKMNS | DSGVPDRFTGSGSGTDFTLTISNVQSE |
| | | LQADDTAIYYCARNPLTATVMDYWGQGT | DLAEYLCQQYNSYPLTFGAGTKLELK |
| | | SVTVSS [SEQ ID NO: 35] | [SEQ ID NO: 36] |
| 20037 | 6B3 | QVQLKESGPGLVAPSQSLSITCTVSGFS | DIQMTQTTSSLSASLGDRVTISCSASQ |
| | | LTSYAISWVRQPPGKGLEWLGVIWPGGG | GISNYLNWYQQKPDGTVKLLIYYTSSL |
| | | TNYNSALKSRLSISKDNSKSQVFLKMNS | HSGVPSRFSGSGSGTDYSLTISNLEPE |
| | | LQTDDTARYYCARGTGTWYFDVWGAGTT | DIATYYCQQYSDLPWTFGGGTKLEIK |
| | | VTVSS [SEQ ID NO: 37] | [SEQ ID NO: 38] |

TABLE 14
Amino acid and DNA sequences of heavy and light chain humanized 1C8,
1G1 and 5G8

| | | |
|---|---|---|
| SEQ | | |
| ID | | |
| NO | DESCRIPTION | SEQUENCE |

Protein Sequences

| | | |
|---|---|---|
| 45 | Humanized 1C8 heavy chain | EVQLVESGGGLIQPGGSLRLSCAASGFSLTTYAISWV |
| | variable domain sequence 1 | RQAPGKGLEWVSIIWPGGGTNYADSVKGRFTISRDNS |
| | (H5): Heavy chain mouse 1C8 | KNTLYLQMNSLRAEDTAVYYCARGAGTWYFDVWG |
| | CDRs ported onto framework | QGTLVTVSS |
| | of germline IGHV3-66*03 | |
| 51 | Humanized 1C8 heavy chain | EVQLVESGGGLIQPGGSLRLSCAVSGFSLTTYAISWV |
| | variable domain sequence 2 | RQAPGKGLEWLGIIWPGGGTNYADSVKGRFTISRDNS |
| | (H6) | KNTLYLQMNSLRAEDTAVYYCARGAGTWYFDVWG |
| | | QGTLVTVSS |
| 52 | Humanized 1C8 heavy chain | EVQLVESGGGLIQPGGSLRLSCAVSGFSLTTYAISWV |
| | variable domain sequence 3 | RQAPGKGLEWLGIIWPGGGTNYADSVKGRFTISKDNS |
| | (H7) | KNTLYLQMNSLRAEDTAVYYCARGAGTWYFDVWG |
| | | QGTLVTVSS |
| 53 | Humanized 1C8 heavy chain | EVQLVESGGGLIQPGGSLRISCAVSGFSLTTYAISWVR |
| | variable domain sequence 4 | QAPGKGLEWLGIIWPGGGTNYADSLKGRLTISKDNSK |
| | (H8) | NTVLQMNSLRTEDTAVYYCARGAGTWYFDVWGQ |
| | | GTLVTVSS |
| 48 | Humanized 1C8 light chain | DIQMTQSPSSLSASVGDRVTITCSASQGISNYLNWVQ |
| | variable domain sequence 1 | QKPGKAPKLLIYYTSSLHSGVPSRFSGSGSGTDFTFTIS |
| | (L1): Light chain mouse 1C8 | SLQPEDIATYYCQQYSKFPWTGQGTKVEIK |
| | CDRs ported onto framework | |
| | of germline IGKV1D-33*01 | |
| 54 | Humanized 1C8 light chain | DIQMTQSPSSLSASVGDRVTITCSASQGISNYLNWYQ |
| | variable domain sequence 2 | QKPGKARKLLIYYTSSLHSGVPSRFSGSGSGTDYTLTI |
| | (L2) | SSLQPEDIATYYCQQYSKFPWTFGQGTKLEIK |
| 55 | Humanized 1C8 light chain | DIQMTQSPSSLSASVGDRVTITCSASQGISNYLNWYQ |
| | variable domain sequence 3 | QKPGKTVKLLIYYTSSLHSGVPSRFSGSGSGTDYTLTI |
| | (L3) | SSLQPEDIATYYCQQYSKFPWTFGQGTKLEIK |
| 46 | Humanized 1G1 heavy chain | EVQLVESGGGLVQPGGSLRLSCAASGFTFSEFGMHW |
| | variable domain sequence 1 | VRQAPGKGLEWVSYISSGGSTIYYADSVKGRFTISRD |
| | (H1): Heavy chain mouse 1G1 | NAKNSLYLQMNSLRAEDTAVYYCARDWVDYWGQG |
| | CDRs ported onto framework: | TLVTVSS |
| | of germline IGHV3-48*03 | |
| 56 | Humanized 1G1 heavy chain | EVQLVESGGGLVQPGGSLRLSCAASGFTFSEFGMHW |
| | variable domain sequence 2 | VRQAPGKGLEWVYAYISSGGSTIYYADSVKGRFTISRD |
| | (H2) | NAKNSLYLQMNSLRAEDTAVYYCARDWVDYWGQG |
| | | TLLTVSS |
| 57 | Humanized 1G1 heavy chain | EVQLVESGGGLVQPGGSLRLSCAASGFTFSEFGMHW |
| | variable domain sequence 3 | VRQAPGKGLEWVAYISSGGSTIYYADSVKGRFTISRD |
| | (H3) | NAKNSLYLQMNSLRAEDTAMYYCARDWVDYWGQG |
| | | TLLTVSS |
| 49 | Humanized 1G1 light chain | EIVLTQSPATLSLSPGERATLSCKASENVGSYVSWYQ |
| | variable domain sequence 1 | QKPGQAPRLLIYGASNRYTGIPARFSGSGSGTDFTLTI |
| | (L1): Light chain mouse 1G1 | SSLEPEDFAVYYCGQSYSYPLTFGGGTKVEIK |
| | CDRs ported onto framework | |
| | of germline IGKV3-11*01 | |
| 58 | Humanized 1G1 light chain | EIVLTQSPATLSLSPGERATLSCKASENVGSYVSWYQ |
| | variable domain sequence 2 | QKPGQAPRLLIYGASNRYTGVPARFSGSGSGTDFTLTI |
| | (L2) | SSLEPEDFAVYYCGQSYSYPLTFGGGTKVEIK |
| 59 | Humanized 1G1 light chain | EIVMTQSPATLSLSPGERVTLSCKASENVGSYVSWYQ |
| | variable domain sequence 3 | QKPGQAPRLLIYGASNRYTGVPARFSGSGSGTDFTLTI |
| | (L3) | SSVEPEDFAVYYCGQSYSYPLTFGGGTKLELK |
| 60 | Humanized 1G1 light chain | EIVMTQSPATLSLSPGERVTLSCKASENVGSYVSWYQ |
| | variable domain sequence 4 | QKPGQAPRLLIYGASNRYTGVPARFSGSGSGTDFTLTI |
| | (L4) | SSVEPEDLAVYYCGQSYSYPLTEGGGTKLELK |
| 47 | Humanized 5G8 heavy chain | QVQLQESGPGLVKPSETLSLTCTVSGFSLISYGVHWIR |
| | variable domain sequence 1 | QPPGKGLEWIGVIWSGGSTDYNPSLKSRVTISVDTSK |
| | (H1): Heavy chain mouse 5G8 | NQFSLKLSSVTAADTAVYYCARNPLTATVMDYWGQ |
| | CDRs ported onto framework | GTLVTVSS |
| | of germline 1GHV4-59*08 | |
| 61 | Humanized 5G8 heavy chain | QVQLQESGPGLVKPSETLSLTCTVSGFSLISYGVHWV |
| | variable domain sequence 2 | RQPPGKGLEWLGVIWSGGSTDYNPSLKSRVTISKDTS |
| | (H2) | KNQFSLKLSSVTAADTAVYYCARNPLTATVMDYWG |
| | | QGTLVTVSS |
| 62 | Humanized 5G8 heavy chain | QVQLQESGPGLVKPSETLSITCTVSGFSLISYGVHWVR |
| | variable domain sequence 3 | QPPGKGLEWLGVIWSGGSTDYNPSLKSRVTISKDTSK |
| | (H3) | NQVSFKLSSLTAADTAIYYCARNPLTATVMDYWGQG |
| | | TLVTVSS |
| 63 | Humanized 5G8 heavy chain | QVQLQESGPGLVKPSETLSITCTVSGFSLISYGVHWVR |
| | variable domain sequence 4 | QPPGKGLEWLGVIWSGGSTDYNPSLKSRVTISKDNSK |
| | (H4) | NQVSFKLSSLTAADTAIYYCARNPLTATVMDYWGQG |
| | | TLVTVSS |
| 50 | Humanized 5G8 light chain | DIQMTQSPSSLSASVGDRVTITCRASQNVGTNVAWFQ |
| | variable domain sequence 1 | QKPGKAPKSLIYSASYRDSGVPSRFSGSGSGTDFTLTI |
| | (L1): Light chain mouse 5G8 | SSLQPEDFATYYCQQYNSYPLTFGGGTKVEIK |
| | CDRs ported onto framework | |
| | of germline IGKV1-16*01 | |
| 64 | Humanized 5G8 light chain | DIQMTQSPSSLSASVGDRVTITCRASQNVGTNVAWY |
| | variable domain sequence 2 | QQKPGKAPKALIYSASYRDSGVPSRFSGSGSGTDFTL |
| | (L2) | TISSLQPEDFATYYCQQYNSYPLTFGGGTKVEIK |
| 65 | Humanized 5G8 light chain | DIQMTQSPSSLSASVGDRVTVTCRASQNVGTNVAWY |
| | variable domain sequence 3 | QQKPGKAPKALIYSASYRDSGVPSRFSGSGSGTDFTL |
| | (L3) | TISSVQPEDFATYYCQQYNSYPLTFGGGTKLEIK |
| 66 | Humanized 5G8 light chain | DIQMTQSPSSLSASVGDRVTVTCRASQNVGTNVAWY |
| | variable domain sequence 4 | QQKPGKAPKALIYSASYRDSGVPSRFSGSGSGTDFTL |
| | (L4) | TISSVQPEDLATYYCQQYNSYPLTFGGGTKLEIK |
| 67 | Ckappa domain of IGKC*01 | RTVAAPSVFIFPPSDEQLKSGTASVVCLLNNFYPREAK |
| | | VQWKVDNALQSGNSQESVTEQDSKDSTYSLSSTLTLS |
| | | KADYEKHKVYACEVTHQGLSSPVTKSFNRGEC |
| 68 | IgG1 CH1-hinge-CH2-CH3 | ASTKGPSVFPLAPSSKSTSGGTAALGCLVKDYFPEPVT |
| | | VSWNSGALTSGVHTFPAVLQSSGLYSLSSVVTVPSSS |
| | | LGTQTYICNVNHKPSNTKVDKKVEPKSCDKTHTCPPC |
| | | PAPEAAGGPSVFLFPPKPKDTLMISRTPEVTCVVVSVS |
| | | HEDPEVKFNWYVDGVEVHNAKTKPREEQYNSTYRV |
| | | VSVLTVLHQDWLNGKEYKCKVSNKALPAPIEKTISK |
| | | AKGQPREPQVYTLPPSRDELTKNQVSLTCLVKGFYPS |
| | | DIAVEWESNGQPENNYKTTPPVLDSDGSFFLYSKLTV |
| | | DKSRWQQGNVFSCSVMEALHNHYTQKSLSLSPG |
| 69 | IgG1 Fc sequence 231-446 | APEAAGGPSVFLFPPKPKDTLMISRTPEVTCVVVSVSH |
| | (EU-numbering), without | EDPEVKFNWYVDGVEVHNAKTKPREEQYNSTYRVV |
| | hinge | SVLTVLHQDWLNGKEYKCKVSNKALPAPIEKTISKA |
| | | KGQPREPQVYTLPPSRDELTKNQVSLTCLVKGFYPSD |
| | | IAVEWESNGQPENNYKTTPPVLDSDGSFFLYSKLTVD |
| | | KSRWQQGNVFSCSVMHEALHNHYTQKSLSLSPG |

TABLE 15
Sequences used in the construction of 4-1BB × HER2 antibodies

| SEQ ID NO: | Paratope/domain | Target | Sequence |
|---|---|---|---|
| 71 | MOR7480.1 VH | 4-1BB | EVQLVQSGAEVKKPGESLRISCKGSGYSFSTYWI |
| | | | SWVRQMPGKGLEWMGKIYPGDSYTNYSPSFQG |
| | | | QVTISADKSISTAYLQWSSLKASDTAMYYCARG |
| | | | YGIFDYWGQGTLVTVSS |
| 72 | MOR7480.1 VL | 4-1BB | SYELTQPPSVSVSPGQTASITCSGDNIGDQYAHW |
| | | | YQQKPGQSPVLVIYQDKNRPSGIPERFSGSNSGN |
| | | | TATLTISGTQAMDEADYYCATYTGFGSLAVFGG |
| | | | GTKLTVL |
| 73 | Anti-HER2 scFv | HER2 | DIQMTQSPSSLSASVGDRVTITCRASQDVNTAVA |
| | | | WYQQKPGKAPKLLIYSASFLYSGVPSRFSGSRSG |
| | | | TDFTLTISSLQPEDFATYYCQQHYTTPPTFGQGT |
| | | | KVEIKGGSGGGSGGGSGGGSGGGSGEVQLVESG |
| | | | GGLVQPGGSLRLSCAASGFNIKDTYIHWVRQAP |
| | | | GKGLEWVARIYPTNGYTRYADSVKGRFTISADT |
| | | | SKNTAYLQMNSLRAEDTAVYYCSRWGGDGFYA |
| | | | MDYWGQGTLVTVSS |

TABLE 16
Sequences used in the preparation of additional 4-1BB × TAA
bispecific antibody constructs

| | Paratope | SEQ ID | |
|---|---|---|---|
| Target | Source | NO: | scFv Sequence |
| Mesothelin | RG7787 | 74 | QVQLVQSGAEVKKPGASVKVSCKASGYSFTGYTMNWVR |
| | | | QAPGQGLEWMGLITPYNGASSYNQKFRGKATMTVDTST |
| | | | STVYMELSSLRSEDTAVYYCARGGYDGRGFDYWGQGTL |
| | | | VTVSSGGGGSGGGGSGGGGSDIQMTQSPSSLSASVGDR |
| | | | VTITCSASSSVSYMHWYQQKSGKAPKLLIYDTSKLASG |
| | | | VPSRFSGSGSGTDFTLTISSLQPEDFATYYCQQWSKHP |
| | | | LTFGQGTKLEIK |
| Mesothelin | Anetumab | 75 | QVELVQSGAEVKKPGESLKISCKGSGYSFTSYWIGWVR |
| | | | QAPGKGLEWMGIIDPGDSRTRYSPSFQGQVTISADKSI |
| | | | STAYLQWSSLKASDTAMYYCARGQLYGGTYMDGWGQGT |
| | | | LVTVSSVEGGSGGSGGSGGSGGVDDIALTQPASVSGSP |
| | | | GQSITISCTGTSSDIGGYNSVSWYQQHPGKAPKLMIYG |
| | | | VNNRPSGVSNRFSGSKSGNTASLTISGLQAEDEADYYC |
| | | | SSYDIESATPVFGGGTKLTVL |
| NaPi2b | Lifastuzumab | 76 | EVQLVESGGGLVQPGGSLRLSCAASGFSFSDFAMSWVR |
| | | | QAPGKGLEWVATIGRVAFHTYYPDSMKGRFTISRDNSK |
| | | | NTLYLQMNSLRAEDTAVYYCARHRGFDVGHFDFWGQGT |
| | | | LVTVSSGGGGSGGGGSGGGGSDIQMTQSPSSLSASVGD |
| | | | RVTITCRSSETLVHSSGNTYLEWYQQKPGKAPKLLIYR |
| | | | VSNRFSGVPSRFSGSGSGTDFTLTISSLQPEDFATYYC |
| | | | FQGSFNPLTFGQGTKVEIK |
| NaPi2b | MX-35 | 77 | DIQMTQSPSSLSASVGDRVTITCSASQDIGNFLNWYQQ |
| | | | KPGKTVKVLIYYTSSLYSGVPSRFSGSGSGTDYTLTIS |
| | | | SLQPEDFATYYCQQYSKLPLTFGQGTKLELKGGGGSGG |
| | | | GGSGGGGSQVQLVQSGAEVVKPGASVKMSCKASGYTFT |
| | | | GYNIHWVKQAPGQGLEWIGAIYPGNGDTSYKQKFRGRA |
| | | | TLTADTSTSTVYMELSSLRSEDSAVYYCARGETARATF |
| | | | AYWGQGTLVTSS |
| FRα | Mirvetuximab | 78 | QVQLVQSGAEVVKPGASVKISCKASGYTFTGYFMNWVK |
| | | | QSPGQSLEWIGRIHPYDGDTFYNQKFQGKATLTVDKSS |
| | | | NTAHMELLSLTSEDFAVYYCTRYDGSRAMDYWGQGTTV |
| | | | TVSSGGGGSGGGGSGGGGSDIVLTQSPLSLAVSLGQPA |
| | | | IISCKASQSVSFAGTSLMHWYHQKPGQQPRLLIYRASN |
| | | | LEAGVPDRFSGSGSKTDFTLTISPVEAEDAATYYCQQS |
| | | | REYPYTFGGGTKLEIK |

TABLE 17
VH and VL sequences used in the preparation of constructs

| Name | Domain | Sequence |
|---|---|---|
| HER2 scFv having | VH | EVQLVESGGGLVQPGGSLRLSCAASGFNIKDTYIHWVRQAPGKGLEW |
| SEQ ID NO 73 | | VARIYPTNGYTRYADSVKGRFTISADTSKNTAYLQMNSLRAEDTAVY |
| | | YCSRWGGDGFYAMDYWGQGTLVTVSS (SEQ ID NO: 322) |
| | VL | DIQMTQSPSSLSASVGDRVTITCRASQDVNTAVAWYQQKPGKAPKLLI |
| | | YSASFLYSGVPSRFSGSRSGTDFTLTISSLQPEDFATYYCQQHYTTPPTF |
| | | GQGTKVEIK (SEQ ID NO: 323) |
| MSLN scFv having | VH | QVQLVQSGAEVKKPGASVKVSCKASGYSFTGYTMNWVRQAPGQGLE |
| SEQ ID NO: 74 | | WMGLITPYNGASSYNQKFRGKATMTVDTSTSTVYMELSSLRSEDTAV |
| (RG7787) | | YYCARGGYDGRGFDYWGQGTLVTVSS (SEQ ID NO: 324) |
| | VL | DIQMTQSPSSLSASVGDRVTITCSASSSVSYMHWYQQKSGKAPKLLIY |
| | | DTSKLASGVPSRFSGSGSGTDFTLTISSLQPEDFATYYCQQWSKHPLTF |
| | | GQGTKLEIK (SEQ ID NO: 325) |
| MSLN scFv having | VH | QVELVQSGAEVKKPGESLKISCKGSGYSFTSYWIGWVRQAPGKGLEW |
| SEQ ID NO: 75 | | MGIIDPGDSRTRYSPSFQGQVTISADKSISTAYLQWSSLKASDTAMYY |
| (anetumab) | | CARGQLYGGTYMDGWGQGTLVTVSS (SEQ ID NO: 326) |
| | VL | DIALTQPASVSGSPGQSITISCTGTSSDIGGYNSVSWYQQHPGKAPKLM |
| | | IYGVNNRPSGVSNRFSGSKSGNTASLTISGLQAEDEADYYCSSYDIESA |
| | | TPVFGGGTKLTVL (SEQ ID NO: 327) |
| NaPi2b scFv | VH | EVQLVESGGGLVQPGGSLRLSCAASGFSFSDFAMSWVRQAPGKGLEW |
| having SEQ ID | | VATIGRVAFHTYYPDSMKGRFTISRDNSKNTLYLQMNSLRAEDTAVY |
| NO: 76 | | YCARHRGFDVGHFDFWGQGTLVTVSS (SEQ ID NO: 328) |
| (lifastuzumab) | VL | DIQMTQSPSSLSASVGDRVTITCRSSETLVHSSGNTYLEWYQQKPGKA |
| | | PKLLIYRVSNRFSGVPSRFSGSGSGTDFTLTISSLQPEDFATYYCFQGSF |
| | | NPLTFGQGTKVEIK (SEQ ID NO: 329) |
| NaPi2b scFv | VH | QVQLVQSGAEVVKPGASVKMSCKASGYTFTGYNIHWVKQAPGQGLE |
| having SEQ ID | | WIGAIYPGNGDTSYKQKFRGRATLTADTSTSTVYMELSSLRSEDSAVY |
| NO: 77 (MX-35) | | YCARGETARATFAYWGQGTLVTVSS (SEQ ID NO: 330) |
| | VL | DIQMTQSPSSLSASVGDRVTITCSASQDIGNFLNWYQQKPGKTVKVLI |
| | | YYTSSLYSGVPSRFSGSGSGTDYTLTISSLQPEDFATYYCQQYSKLPLT |
| | | FGQGTKLELK (SEQ ID NO: 331) |
| FRα scFv having | VH | QVQLVQSGAEVVKPGASVKISCKASGYTFTGYFMNWVKQSPGQSLE |
| SEQ ID NO: 78 | | WIGRIHPYDGDTFYNQKFQGKATLTVDKSSNTAHMELLSLTSEDFAV |
| (mirvetuximab) | | YYCTRYDGSRAMDYWGQGTTVTVSS (SEQ ID NO: 332) |
| | VL | DIVLTQSPLSLAVSLGQPAIISCKASQSVSFAGTSLMHWYHQKPGQQP |
| | | RLLIYRASNLEAGVPDRFSGSGSKTDFTLTISPVEAEDAATYYCQQSRE |
| | | YPYTFGGGTKLEIK (SEQ ID NO: 333) |
| 8K22 | VH | QEQLVESGGGLVQPEGSLTLTCKASGFTISNNYYMCWVRQAPGKGLE |
| | | WIACIYGGISGRTYYASWAKGRFTISKTSSTTVTLQMTSLTAADTATY |
| | | FCVRGYVGTSNLWGPGTLVTVSS (SEQ ID NO: 298) |
| 8K22 | VL | DIVMTQTPASVEAAVGGTVTIKCQASQSIYSSLAWYQQKPGQSPKLLI |
| | | YDASHLASGVPSRFSGSRYGTEFTLTISGVQCDDAATYYCQGGWYSS |
| | | AATYVPNTFGGGTEVVVK (SEQ ID NO: 299) |
| 1H06 | VH | QEQLVESGGGLVQPEGSLTLTCTASKFSFSSLYYMCWVRQAPGKGLE |
| | | WIACVYGGSSGNTYYASWAKGRFTISKASSTTVTLQLTSLTAADTAT |
| | | YFCARFDVDGSGFNLWGPGTLVTVSS (SEQ ID NO: 300) |
| 1H06 | VL | DIVMTQTPSSVSAAVGGTVTIKCQASQTIGSSLAWYQQKPGQPPKLLI |
| | | YRASTLASGVSSRFRGSGSGTEYTLTISDLECADAATYYCQWTDYGYI |
| | | YIWAFGGGTEVVVK (SEQ ID NO: 301) |
| Pertuzumab | VH | EVQLVESGGGLVQPGGSLRLSCAASGFTFTDYTMDWVRQAPGKGLE |
| | | WVADVNPNSGGSIYNQRFKGRFTLSVDRSKNTLYLQMNSLRAEDTAV |
| | | YYCARNLGPSFYFDYWGQGTLVTVSS (SEQ ID NO: 302) |
| Pertuzumab | VL | DIQMTQSPSSLSASVGDRVTITCKASQDVSIGVAWYQQKPGKAPKLLI |
| | | YSASYRYTGVPSRFSGSGSGTDFTLTISSLQPEDFATYYCQQYYIYPYT |
| | | FGQGTKVEIK (SEQ ID NO: 303) |
| Farletuzumab | VH | EVQLVESGGGVVQPGRSLRLSCSASGFTFSGYGLSWVRQAPGKGLEW |
| | | VAMISSGGSYTYYADSVKGRFAISRDNAKNTLFLQMDSLRPEDTGVY |
| | | FCARHGDDPAWFAYWGQGTPVTVSS (SEQ ID NO: 304) |
| Farletuzumab | VL | DIQLTQSPSSLSASVGDRVTITCSVSSSISSNNLHWYQQKPGKAPKPWI |
| | | YGTSNLASGVPSRFSGSGSGTDYTFTISSLQPEDIATYYCQQWSSYPYM |
| | | YTFGQGTKVEIK (SEQ ID NO: 305) |

TABLE 18
CDR sequences

| SEQ NAME | Definition | HCDR1 | HCDR2 | HCDR3 | LCDR1 | LCDR2 | LCDR3 |
|---|---|---|---|---|---|---|---|
| 1H06_VH | Kabat | SLYYMC (SEQ ID | CVYGGSSGNTYYASWAKG | FDVDGSGFNL (SEQ ID | | | |
| | | NO: 470) | (SEQ ID NO: 471) | NO: 472) | | | |
| | Chothia | KFSFSSLY (SEQ | YGGSSGN (SEQ ID NO: 474) | FDVDGSGFNL (SEQ ID | | | |
| | | ID NO: 473) | | NO: 472) | | | |
| | IMGT | KFSFSSLYY (SEQ | VYGGSSGNT (SEQ ID NO: | ARFDVDGSGFNL (SEQ | | | |
| | | ID NO: 475) | 476) | ID NO: 477) | | | |
| | AbM | KFSFSSLYYMC | CVYGGSSGNTY (SEQ ID | FDVDGSGFNL (SEQ ID | | | |
| | | (SEQ ID NO: 478) | NO: 479) | NO: 472) | | | |
| | Contact | SSLYYMC (SEQ | WIACVYGGSSGNTY (SEQ | ARFDVDGSGFN (SEQ ID | | | |
| | | ID NO: 480) | ID NO: 481) | NO: 482) | | | |
| 1H06_VL | Kabat | | | | QASQTIGSSLA (SEQ ID | RASTLAS (SEQ | QWTDYGYIYIWA |
| | | | | | NO: 483) | ID NO: 484) | (SEQ ID NO: 485) |
| | Chothia | | | | QASQTIGSSLA (SEQ ID | RASTLAS (SEQ | QWTDYGYIYIWA |
| | | | | | NO: 483) | ID NO: 484) | (SEQ ID NO: 485) |
| | IMGT | | | | QTIGSS (SEQ ID NO: | RAS | QWTDYGYIYIWA |
| | | | | | 486) | | (SEQ ID NO: 485) |
| | AbM | | | | QASQTIGSSLA (SEQ ID | RASTLAS (SEQ | QWTDYGYIYIWA |
| | | | | | NO: 483) | ID NO: 484) | (SEQ ID NO: 485) |
| | Contact | | | | GSSLAWY (SEQ ID NO: | LLIYRASTLA | QWTDYGYIYIW (SEQ |
| | | | | | 487) | (SEQ ID NO: | ID NO: 489) |
| | | | | | | 488) | |
| 8K22_VH | Kabat | NNYYMC (SEQ ID | CIYGGISGRTYYASWAKG | GYVGTSNL (SEQ ID NO: | | | |
| | | NO: 490) | (SEQ ID NO: 491) | 492) | | | |
| | Chothia | GFTISNNY (SEQ | YGGISGR (SEQ ID NO: | GYVGTSNL (SEQ ID NO: | | | |
| | | ID NO: 493) | 494) | 492) | | | |
| | IMGT | GFTISNNYY (SEQ | IYGGISGRT (SEQ ID NO: | VRGYVGTSNL (SEQ ID | | | |
| | | ID NO: 495) | 496) | NO: 497) | | | |
| | AbM | GFTISNNYYMC | CIYGGISGRTY (SEQ ID NO: | GYVGTSNL (SEQ ID NO: | | | |
| | | (SEQ ID NO: 498) | 499) | 492) | | | |
| | Contact | SNNYYMC (SEQ | WIACIYGGISGRTY (SEQ ID | VRGYVGTSN (SEQ ID | | | |
| | | ID NO: 500) | NO: 501) | NO: 502) | | | |
| 8K22_VL | Kabat | | | | QASQSIYSSLA (SEQ ID | DASHLAS | QGGWYSSAATYVPNT |
| | | | | | NO: 503) | (SEQ ID NO: | (SEQ ID NO: 505) |
| | | | | | | 504) | |
| | Chothia | | | | QASQSIYSSLA (SEQ ID | DASHLAS | QGGWYSSAATYVPNT |
| | | | | | NO: 503) | (SEQ ID NO: | (SEQ ID NO: 505) |
| | | | | | | 504) | |
| | IMGT | | | | QSIYSS (SEQ ID NO: 506) | DAS | QGGWYSSAATYVPNT |
| | | | | | | | (SEQ ID NO: 505) |
| | AbM | | | | QASQSIYSSLA (SEQ ID | DASHLAS | QGGWYSSAATYVPNT |
| | | | | | NO: 503) | (SEQ ID NO: | (SEQ ID NO: 505) |
| | | | | | | 504) | |
| | Contact | | | | YSSLAWY (SEQ ID NO: | LLIYDASHLA | QGGWYSSAATYVPN |
| | | | | | 507) | (SEQ ID NO: | (SEQ ID NO: 509) |
| | | | | | | 508) | |
| Mouse 1G1 | Kabat | | | | KASENVGSYVS (SEQ ID | GASNRYT | GQSYSYPLT (SEQ ID |
| VL or mouse | | | | | NO: 510) | (SEQ ID NO: | NO: 512) |
| 3E7 VL | | | | | | 511) | |
| corresponding | Chothia | | | | KASENVGSYVS (SEQ ID | GASNRYT | GQSYSYPLT (SEQ ID |
| to | | | | | NO: 510) | (SEQ ID NO: | NO: 512) |
| SEQ ID | | | | | | 511) | |
| NO: 10 | IMGT | | | | ENVGSY (SEQ ID NO: | GAS | GQSYSYPLT (SEQ ID |
| | | | | | 513) | | NO: 512) |
| | AbM | | | | KASENVGSYVS (SEQ ID | GASNRYT | GQSYSYPLT (SEQ ID |
| | | | | | NO: 510) | (SEQ ID NO: | NO: 512) |
| | | | | | | 511) | |
| | Contact | | | | GSYVSWY (SEQ ID NO: | LLIYGASNRY | GQSYSYPL (SEQ ID |
| | | | | | 514) | (SEQ ID NO: | NO: 516) |
| | | | | | | 515) | |
| Mouse 2A7 | Kabat | SYVMH (SEQ ID | YINPYNDGTKYNEKFKG | LGSRGTWFAY (SEQ ID | | | |
| VH | | NO: 517) | (SEQ ID NO: 518) | NO: 519) | | | |
| corresponding | Chothia | GYTFTSY (SEQ ID | NPYNDG (SEQ ID NO: 521) | LGSRGTWFAY (SEQ ID | | | |
| to | | NO: 520) | | NO: 519) | | | |
| SEQ ID | IMGT | GYTFTSYV (SEQ | INPYNDGT (SEQ ID NO: | ARLGSRGTWFAY (SEQ | | | |
| NO: 11 | | ID NO: 522) | 523) | ID NO: 524) | | | |
| | Abm | GYTFTSYVMH | YINPYNDGTK (SEQ ID NO: | LGSRGTWFAY (SEQ ID | | | |
| | | (SEQ ID NO: 525) | 526) | NO: 519) | | | |
| | Contact | TSYVMH (SEQ ID | WIGYINPYNDGTK (SEQ ID | ARLGSRGTWFA (SEQ | | | |
| | | NO: 527) | NO: 528) | ID NO: 529) | | | |
| Mouse 2A7 | Kabat | | | | KASQDVGTAVG (SEQ | WASTRRT | QQYSSYPLT (SEQ ID |
| VL | | | | | ID NO: 530) | (SEQ ID NO: | NO: 532) |
| corresponding | | | | | | 531) | |
| to | Chothia | | | | KASQDVGTAVG (SEQ | WASTRRT | QQYSSYPLT (SEQ ID |
| SEQ ID | | | | | ID NO: 530) | (SEQ ID NO: | NO: 532) |
| NO: 12 | | | | | | 531) | |
| | IMGT | | | | QDVGTA (SEQ ID NO: | WAS | QQYSSYPLT (SEQ ID |
| | | | | | 533) | | NO: 532) |
| | AbM | | | | KASQDVGTAVG (SEQ | WASTRRT | QQYSSYPLT (SEQ ID |
| | | | | | ID NO: 530) | (SEQ ID NO: | NO: 532) |
| | | | | | | 531) | |
| | Contact | | | | GTAVGWY (SEQ ID NO: | LLIYWASTRR | QQYSSYPL (SEQ ID |
| | | | | | 534) | (SEQ ID NO: | NO: 536) |
| | | | | | | 535) | |
| Mouse 2E8 | Kabat | SYGVH (SEQ ID | VIWSGGSTDYNAAFIS | NPLTATVMDY (SEQ ID | | | |
| VH | | NO: 537) | (SEQ ID NO: 538) | NO: 539) | | | |
| corresponding | Chothia | GFSLTSY (SEQ ID | WSGGS (SEQ ID NO: 541) | NPLTATVMDY (SEQ ID | | | |
| to | | NO: 540) | | NO: 539) | | | |
| SEQ ID | IMGT | GFSLTSYG (SEQ | IWSGGST (SEQ ID NO: 543) | ARNPLTATVMDY (SEQ | | | |
| NO: 13 | | ID NO: 542) | | ID NO: 544) | | | |
| | AbM | GFSLTSYGVH | VIWSGGSTD (SEQ ID NO: | NPLTATVMDY (SEQ ID | | | |
| | | (SEQ ID NO: 545) | 546) | NO: 539) | | | |
| | Contact | TSYGVH (SEQ ID | WLGVIWSGGSTD (SEQ ID | ARNPLTATVMD (SEQ | | | |
| | | NO: 547) | NO: 548) | ID NO: 549) | | | |
| Mouse 2E8 | Kabat | | | | KASQNVGTNVA (SEQ | SASYRHS (SEQ | QQYNSYPLT (SEQ ID |
| VL | | | | | ID NO: 550) | ID NO: 551) | NO: 552) |
| corresponding | Chothia | | | | KASQNVGTNVA (SEQ | SASYRHS (SEQ | QQYNSYPLT (SEQ ID |
| to | | | | | ID NO: 550) | ID NO: 551) | NO: 552) |
| SEQ ID | IMGT | | | | QNVGTN (SEQ ID NO: | SAS | QQYNSYPLT (SEQ ID |
| NO: 14 | | | | | 553) | | NO: 552) |
| | AbM | | | | KASQNVGTNVA (SEQ | SASYRHS (SEQ | QQYNSYPLT (SEQ ID |
| | | | | | ID NO: 550) | ID NO: 551) | NO: 552) |
| | Contact | | | | GTNVAWY (SEQ ID NO: | VLIYSASYRH | QQYNSYPL (SEQ ID |
| | | | | | 554) | (SEQ ID NO: | NO: 556) |
| | | | | | | 555) | |
| Mouse 2H9 | Kabat | SYWMS (SEQ ID | RIDPYDSETHYNQKFKD | TYYGNYDAMDY (SEQ | | | |
| VH | | NO: 557) | (SEQ ID NO: 558) | ID NO: 559) | | | |
| corresponding | Chothia | GYPFTSY (SEQ ID | DPYDSE (SEQ ID NO: 561) | TYYGNYDAMDY (SEQ | | | |
| to | | NO: 560) | | ID NO: 559) | | | |
| SEQ ID | IMGT | GYPFTSYW (SEQ | IDPYDSET (SEQ ID NO: | ARTYYGNYDAMDY | | | |
| NO: 15 | | ID NO: 562) | 563) | (SEQ ID NO: 564) | | | |
| | AbM | GYPFTSYWMS | RIDPYDSETH (SEQ ID NO: | TYYGNYDAMDY (SEQ | | | |
| | | (SEQ ID NO: 565) | 566) | ID NO: 559) | | | |
| | Contact | TSYWMS (SEQ ID | WIGRIDPYDSETH (SEQ ID | ARTYYGNYDAMD (SEQ | | | |
| | | NO: 567) | NO: 568) | ID NO: 569) | | | |
| Mouse 2H9 | Kabat | | | | RSSKSLLHSYGITYLY | QMSNLAS | AQNLELPLT (SEQ ID |
| VL | | | | | (SEQ ID NO: 570) | (SEQ ID NO: | NO: 572) |
| corresponding | | | | | | 571) | |
| to | Chothia | | | | RSSKSLLHSYGITYLY | QMSNLAS | AQNLELPLT (SEQ ID |
| SEQ ID | | | | | (SEQ ID NO: 570) | (SEQ ID NO: | NO: 572) |
| NO: 16 | | | | | | 571) | |
| | IMGT | | | | KSLLHSYGITY (SEQ ID | QMS | AQNLELPLT (SEQ ID |
| | | | | | NO: 573) | | NO: 572) |
| | AbM | | | | RSSKSLLHSYGITYLY | QMSNLAS | AQNLELPLT (SEQ ID |
| | | | | | (SEQ ID NO: 570) | (SEQ ID NO: | NO: 572) |
| | | | | | | 571) | |
| | Contact | | | | LHSYGITYLYWY (SEQ | LLIYQMSNLA | AQNLELPL (SEQ ID |
| | | | | | ID NO: 574) | (SEQ ID NO: | NO: 576) |
| | | | | | | 575) | |
| Mouse 3D7 | Kabat | SYWIN (SEQ ID | NIYPSDNYTNYNQKFKD | GGGIYYENYFDY (SEQ | | | |
| VH | | NO: 577) | (SEQ ID NO: 578) | ID NO: 579) | | | |
| corresponding | Chothia | GYTFTSY (SEQ ID | YPSDNY (SEQ ID NO: 580) | GGGIYYENYFDY (SEQ | | | |
| to | | NO: 520) | | ID NO: 579) | | | |
| SEQ ID | IMGT | GYTFTSYW (SEQ | IYPSDNYT (SEQ ID NO: | TRGGGIYYENYFDY | | | |
| NO: 17 | | ID NO: 581) | 582) | (SEQ ID NO: 583) | | | |
| | Abm | GYTFTSYWIN | NIYPSDNYTN (SEQ ID NO: | GGGIYYENYFDY (SEQ | | | |
| | | (SEQ ID NO: 584) | 585) | ID NO: 579) | | | |
| | Contact | TSYWIN (SEQ ID | WIGNIYPSDNYTN (SEQ ID | TRGGGIYYENYFD (SEQ | | | |
| | | NO: 586) | NO: 587) | ID NO: 588) | | | |
| Mouse 3D7 | Kabat | | | | SASSSVSYMH (SEQ ID | DTSKLAS (SEQ | QQWSSNPPT (SEQ ID |
| VL | | | | | NO: 589) | ID NO: 590) | NO: 591) |
| corresponding | Chothia | | | | SASSSVSYMH (SEQ ID | DTSKLAS (SEQ | QQWSSNPPT (SEQ ID |
| to | | | | | NO: 589) | ID NO: 590) | NO: 591) |
| SEQ ID | IMGT | | | | SSVSY (SEQ ID NO: 592) | DTS | QQWSSNPPT (SEQ ID |
| NO: 18 | | | | | | | NO: 591) |
| | AbM | | | | SASSSVSYMH (SEQ ID | DTSKLAS (SEQ | QQWSSNTPT (SEQ ID |
| | | | | | NO: 589) | ID NO: 590) | NO: 591) |
| | Contact | | | | SYMHWY (SEQ ID NO: | RWVYDTSKL | QQWSSNPP (SEQ ID |
| | | | | | 593) | A (SEQ ID NO: | NO: 595) |
| | | | | | | 594) | |
| Mouse 3H1 | Kabat | PIAYMS (SEQ ID | DILPSIGRTIYGEKFED | GDYYYGSREYAMDY | | | |
| VH | | NO: 596) | (SEQ ID NO: 597) | (SEQ ID NO: 598) | | | |
| corresponding | Chothia | DSEVFPIA (SEQ | LPSIGR (SEQ ID NO: 600) | GDYYYGSREYAMDY | | | |
| to | | ID NO: 599) | | (SEQ ID NO: 598) | | | |
| SEQ ID | IMGT | DSEVFPIAY (SEQ | ILPSIGRT (SEQ ID NO: | SRGDYYYGSREYAMDY | | | |
| NO: 19 | | ID NO: 601) | 602) | (SEQ ID NO: 603) | | | |
| | AbM | DSEVFPIAYMS | DILPSIGRTI (SEQ ID NO: | GDYYYGSREYAMDY | | | |
| | | (SEQ ID NO: 604) | 605) | (SEQ ID NO: 598) | | | |
| | Contact | FPIAYMS (SEQ ID | WIGDILPSIGRTI (SEQ ID | SRGDYYYGSREYAMD | | | |
| | | NO: 606) | NO: 607) | (SEQ ID NO: 608) | | | |
| Mouse 3H1 | Kabat | | | | RSSQSLVHSNGNTYLH | KVSNRFF (SEQ | SQTTYVPLT (SEQ ID |
| VL | | | | | (SEQ ID NO: 609) | ID NO: 610) | NO: 611) |
| corresponding | Chothia | | | | RSSQSLVHSNGNTYLH | KVSNRFF (SEQ | SQTTYVPLT (SEQ ID |
| to | | | | | (SEQ ID NO: 609) | ID NO: 610) | NO: 611) |
| SEQ ID | IMGT | | | | QSLVHSNGNTY (SEQ ID | KVS | SQTTYVPLT (SEQ ID |
| NO: 20 | | | | | NO: 612) | | NO: 611) |
| | AbM | | | | RSSQSLVHSNGNTYLH | KVSNRFF (SEQ | SQTTYVPLT (SEQ ID |
| | | | | | (SEQ ID NO: 609) | ID NO: 610) | NO: 611) |
| | Contact | | | | VHSNGNTYLHWY (SEQ | LLIYKVSNRF | SQTTYVPL (SEQ ID |
| | | | | | ID NO: 613) | (SEQ ID NO: | NO: 615) |
| | | | | | | 614) | |
| Mouse 3E7 | Kabat | EFGMH (SEQ ID | YISSGSSTIYYADTVKG | DWVDY (SEQ ID NO: | | | |
| VH | | NO: 616) | (SEQ ID NO: 617) | 618) | | | |
| corresponding | Chothia | GFTFSEF (SEQ ID | SSGSST (SEQ ID NO: 620) | DWVDY (SEQ ID NO: | | | |
| to | | NO: 619) | | 618) | | | |
| SEQ ID | IMGT | GFTFSEFG (SEQ | ISSGSSTI (SEQ ID NO: | ARDWVDY (SEQ ID NO: | | | |
| NO: 21 | | ID NO: 621) | 622) | 623) | | | |
| | AbM | GFTFSEFGMH | YISSGSSTIY (SEQ ID NO: | DWVDY (SEQ ID NO: | | | |
| | | (SEQ ID NO: 624) | 625) | 618) | | | |
| | Contact | SEFGMH (SEQ ID | WVAYISSGSSTIY (SEQ ID | ARDWVD (SEQ ID NO: | | | |
| | | NO: 626) | NO: 627) | 628) | | | |
| Mouse 3G4 | Kabat | SYGVH (SEQ ID | VIWSGGSTDYNGAFIS | DRGGGFDY (SEQ ID | | | |
| VH | | NO: 537) | (SEQ ID NO: 629) | NO: 630) | | | |
| corresponding | Chothia | GFSLTSY (SEQ ID | WSGGS (SEQ ID NO: 541) | DRGGGFDY (SEQ ID | | | |
| to | | NO: 540) | | NO: 630) | | | |
| SEQ ID | IMGT | GFSLTSYG (SEQ | IWSGGST (SEQ ID NO: 543) | ARDPGGGFDY (SEQ ID | | | |
| NO: 23 | | ID NO: 542) | | NO: 631) | | | |
| | AbM | GFSLTSYGVH | VIWSGGSTD (SEQ ID NO: | DRGGGFDY (SEQ ID | | | |
| | | (SEQ ID NO: 545) | 546) | NO: 630) | | | |
| | Contact | TSYGVH (SEQ ID | WLGVIWSGGSTD (SEQ ID | ARDRGGGFD (SEQ ID | | | |
| | | NO: 547) | NO: 548) | NO: 632) | | | |
| Mouse 3G4 | Kabat | | | | KSSQSLLWSVNQNNYL | GASIRES (SEQ | QHNHGSFLPYT (SEQ |
| VL | | | | | S (SEQ ID NO: 633) | ID NO: 634) | ID NO: 635) |
| corresponding | Chothia | | | | KSSQSLLWSVNQNNYL | GASIRES (SEQ | QHNHGSFLPYT (SEQ |
| to | | | | | S (SEQ ID NO: 633) | ID NO: 634) | ID NO: 635) |
| SEQ ID | IMGT | | | | QSLLWSVNQNNY (SEQ | GAS | QHNHGSFLPYT (SEQ |
| NO: 24 | | | | | ID NO: 636) | | ID NO: 635) |
| SEQ ID | AbM | | | | KSSQSLLWSVNQNNYL | GASIRES (SEQ | QHNHGSFLPYT (SEQ |
| NO: 24 | | | | | S (SEQ ID NO: 633) | ID NO: 634) | ID NO: 635) |
| | Contact | | | | LWSVNQNNYLSWY | LLIYGASIRE | QHNHGSFLPY (SEQ |
| | | | | | (SEQ ID NO: 637) | (SEQ ID NO: | ID NO: 639) |
| | | | | | | 638) | |
| Mouse 4B11 | Kabat | SYWMN (SEQ ID | RIYPGNGDTNYNGKFKD | YYELDY (SEQ ID NO: | | | |
| VH | | NO: 640) | (SEQ ID NO: 641) | 642) | | | |
| corresponding | Chothia | GYVFSSY (SEQ ID | YPGNGD (SEQ ID NO: 644) | YYELDY (SEQ ID NO: | | | |
| to | | NO: 643) | | 642) | | | |
| SEQ ID | IMGT | GYVFSSYW (SEQ | IYPGNGDT (SEQ ID NO: | ASYYELDY (SEQ ID | | | |
| NO: 25 | | ID NO: 645) | 646) | NO: 647) | | | |
| | AbM | GYVFSSYWMN | RIYPGNGDTN (SEQ ID NO: | YYELDY (SEQ ID NO: | | | |
| | | (SEQ ID NO: 648) | 649) | 642) | | | |
| | Contact | SSYWMN (SEQ ID | WIGRIYPGNGDTN (SEQ ID | ASYYELD (SEQ ID NO: | | | |
| | | NO: 650) | NO: 651) | 652) | | | |
| Mouse 4B11 | Kabat | | | | RSSQSLVHSNGNTYLH | KVSNRFF (SEQ | SQTTYVPLT (SEQ ID |
| VL | | | | | (SEQ ID NO: 609) | ID NO: 610) | NO: 611) |
| corresponding | Chothia | | | | RSSQSLVHSNGNTYLH | KVSNRFF (SEQ | SQTTYVPLT (SEQ ID |
| to | | | | | (SEQ ID NO: 609) | ID NO: 610) | NO: 611) |
| SEQ ID | IMGT | | | | QSLVHSNGNTY (SEQ ID | KVS | SQTTYVPLT (SEQ ID |
| NO: 26 | | | | | NO: 612) | | NO: 611) |
| | AbM | | | | RSSQSLVHSNGNTYLH | KVSNRFF (SEQ | SQTTYVPLT (SEQ ID |
| | | | | | (SEQ ID NO: 609) | ID NO: 610) | NO: 611) |
| | Contact | | | | VHSNGNTYLHWY (SEQ | LLIYKVSNRF | SQTTYVPL (SEQ ID |
| | | | | | ID NO: 613) | (SEQ ID NO: | NO: 615) |
| | | | | | | 614) | |
| Mouse 4E6 | Kabat | SYAIN (SEQ ID | VLWPGGGTNYNSALKS | GSGTWYFDV (SEQ ID | | | |
| VH | | NO: 653) | (SEQ ID NO: 654) | NO: 655) | | | |
| corresponding | Chothia | GFSLTSY (SEQ ID | WPGGG (SEQ ID NO: 656) | GSGTWYFDV (SEQ ID | | | |
| to | | NO: 540) | | NO: 655) | | | |
| SEQ ID | IMGT | GFSLTSYA (SEQ | LWPGGGT (SEQ ID NO: | ARGSGTWYFDV (SEQ | | | |
| NO: 27 | | ID NO: 657) | 658) | ID NO: 659) | | | |
| | AbM | GFSLTSYAIN | VLWPGGGTN (SEQ ID NO: | GSGTWYFDV (SEQ ID | | | |
| | | (SEQ ID NO: 660) | 661) | NO: 655) | | | |
| | Contact | TSYAIN (SEQ ID | WLGVLWPGGGTN (SEQ ID | ARGSGTWYFD (SEQ ID | | | |
| | | NO: 662) | NO: 663) | NO: 664) | | | |
| Mouse 4E6 | Kabat | | | | SASQGISNYLN (SEQ ID | YTSSLHL (SEQ | QQYSKLPWT (SEQ ID |
| VL | | | | | NO: 665) | ID NO: 666) | NO: 667) |
| corresponding | Chothia | | | | SASQGISNYLN (SEQ ID | YTSSLHL (SEQ | QQYSKLPWT (SEQ ID |
| to | | | | | NO: 665) | ID NO: 666) | NO: 667) |
| SEQ ID | IMGT | | | | QGISNY (SEQ ID NO: | YTS | QQYSKLPWT (SEQ ID |
| NO: 28 | | | | | 668) | | NO: 667) |
| | AbM | | | | SASQGISNYLN (SEQ ID | YTSSLHL (SEQ | QQYSKLPWT (SEQ ID |
| | | | | | NO: 665) | ID NO: 666) | NO: 667) |
| | Contact | | | | SNYLNWY (SEQ ID NO: | LLIYYTSSLH | QQYSKLPW (SEQ ID |
| | | | | | 669) | (SEQ ID NO: | NO: 671) |
| | | | | | | 670) | |
| Mouse 4F9 | Kabat | SYWMH (SEQ ID | EINLRNGGTNYYEKFKT | LTSAPSY (SEQ ID NO: | | | |
| VH | | NO: 672) | (SEQ ID NO: 673) | 674) | | | |
| corresponding | Chothia | GYTFTSY (SEQ ID | NLRNGG (SEQ ID NO: 675) | LTSAPSY (SEQ ID NO: | | | |
| to | | NO: 520) | | 674) | | | |
| SEQ ID | IMGT | GYTFTSYW (SEQ | INLRNGGT (SEQ ID NO: | TILTSAPSY (SEQ ID NO: | | | |
| NO: 29 | | ID NO: 581) | 676) | 677) | | | |
| | AbM | GYTFTSYWMH | EINLRNGGTN (SEQ ID NO: | LTSAPSY (SEQ ID NO: | | | |
| | | (SEQ ID NO: 678) | 679) | 674) | | | |
| | Contact | TSYWMH (SEQ ID | WIGEINLRNGGTN (SEQ ID | TILTSAPS (SEQ ID NO: | | | |
| | | NO: 680) | NO: 681) | 682) | | | |
| Mouse 1B2 | Kabat | SFWIN (SEQ ID | NIYPDSSSTNYNEKFKN | SLTFDY (SEQ ID NO: | | | |
| VH | | NO: 683) | (SEQ ID NO: 684) | 685) | | | |
| corresponding | Chothia | GYTFTSF (SEQ ID | YPDSSS (SEQ ID NO: 687) | SLTFDY (SEQ ID NO: | | | |
| to | | NO: 686) | | 685) | | | |
| SEQ ID NO: 3 | IMGT | GYTFTSFW (SEQ | IYPDSSST (SEQ ID NO: | ARSLTFDY (SEQ ID NO: | | | |
| | | ID NO: 688) | 689) | 690) | | | |
| | AbM | GYIFTSFWIN | NIYPDSSSTN (SEQ ID NO: | SLIFDY (SEQ ID NO: | | | |
| | | (SEQ ID NO: 691) | 692) | 685) | | | |
| | Contact | TSFWIN (SEQ ID | WIGNIYPDSSSTN (SEQ ID | ARSLTFD (SEQ ID NO: | | | |
| | | NO: 693) | NO: 694) | 695) | | | |
| Mouse 4F9 | Kabat | | | | KASDNVGISVS (SEQ ID | GASNRYT | GQSYSYPFT (SEQ ID |
| VL | | | | | NO: 696) | (SEQ ID NO: | NO: 697) |
| corresponding | | | | | | 511) | |
| to | Chothia | | | | KASDNVGISVS (SEQ ID | GASNRYT | GQSYSYPFT (SEQ ID |
| SEQ ID | | | | | NO: 696) | (SEQ ID NO: | NO: 697) |
| NO: 30 | | | | | | 511) | |
| | IMGT | | | | DNVGIS (SEQ ID NO: | GAS | GQSYSYPFT (SEQ ID |
| | | | | | 698) | | NO: 697) |
| | AbM | | | | KASDNVGISVS (SEQ ID | GASNRYT | GQSYSYPFT (SEQ ID |
| | | | | | NO: 696) | (SEQ ID NO: | NO: 697) |
| | | | | | | 511) | |
| | Contact | | | | GISVSWY (SEQ ID NO: | LLIYGASNRY | GQSYSYPF (SEQ ID |
| | | | | | 699) | (SEQ ID NO: | NO: 700) |
| | | | | | | 515) | |
| Mouse 4G10 | Kabat | DDYLH (SEQ ID | WIDPENGDTEYASKFQG | QGFAC (SEQ ID NO: | | | |
| VH | | NO: 701) | (SEQ ID NO: 702) | 703) | | | |
| corresponding | Chothia | GFNIKDD (SEQ ID | DPENGD (SEQ ID NO: 705) | QGFAC (SEQ ID NO: | | | |
| to | | NO: 704) | | 703) | | | |
| SEQ ID | IMGT | GFNIKDDY (SEQ | IDPENGDT (SEQ ID NO: | STQGFAC (SEQ ID NO: | | | |
| NO: 31 | | ID NO: 706) | 707) | 708) | | | |
| | AbM | GFNIKDDYLH | WIDPENGDTE (SEQ ID NO: | QGFAC (SEQ ID NO: | | | |
| | | (SEQ ID NO: 709) | 710) | 703) | | | |
| | Contact | KDDYLH (SEQ ID | WIGWIDPENGDTE (SEQ ID | STQGFA (SEQ ID NO: | | | |
| | | NO: 711) | NO: 712) | 713) | | | |
| Mouse 4G10 | Kabat | | | | RSNKSLLHSDGITYLF | RMSNLAS | AQMVEFPRT (SEQ ID |
| VL | | | | | (SEQ ID NO: 714) | (SEQ ID NO: | NO: 716) |
| corresponding | | | | | | 715) | |
| to | Chothia | | | | RSNKSLLHSDGITYLF | RMSNLAS | AQMVEFPRT (SEQ ID |
| SEQ ID | | | | | (SEQ ID NO: 714) | (SEQ ID NO: | NO: 716) |
| NO: 32 | | | | | | 715) | |
| | IMGT | | | | KSLLHSDGITY (SEQ ID | RMS | AQMVEFPRT (SEQ ID |
| | | | | | NO: 717) | | NO: 716) |
| | AbM | | | | RSNKSLLHSDGITYLF | RMSNLAS | AQMVEFPRT (SEQ ID |
| | | | | | (SEQ ID NO: 714) | (SEQ ID NO: | NO: 716) |
| | | | | | | 715) | |
| | Contact | | | | LHSDGITYLFWY (SEQ | LLIYRMSNLA | AQMVEFPR (SEQ ID |
| | | | | | ID NO: 718) | (SEQ ID NO: | NO: 720) |
| | | | | | | 719) | |
| Mouse 5E2 | Kabat | DYYMA (SEQ ID | HINYDSGTYYLDSLKG | DCYGSSSYAVDY (SEQ | | | |
| VH | | NO: 721) | (SEQ ID NO: 722) | ID NO: 723) | | | |
| corresponding | Chothia | GFTFSDY (SEQ ID | NYDGSG (SEQ ID NO: 725) | DCYGSSSYAVDY (SEQ | | | |
| to | | NO: 724) | | ID NO: 723) | | | |
| SEQ ID | IMGT | GFTFSDYY (SEQ | INYDGSGT (SEQ ID NO: | ARDCYGSSSYAVDY | | | |
| NO: 33 | | ID NO: 726) | 727) | (SEQ ID NO: 728) | | | |
| | AbM | GFTFSDYYMA | HINYDGSGTY (SEQ ID NO: | DCYGSSSYAVDY (SEQ | | | |
| | | (SEQ ID NO: 729) | 730) | ID NO: 723) | | | |
| | Contact | SDYYMA (SEQ ID | WVAHINYDGSGTY (SEQ | ARDCYGSSSYAVD | | | |
| | | NO: 731) | ID NO: 732) | (SEQ ID NO: 733) | | | |
| Mouse 5E2 | Kabat | | | | RSSQSIVHSNGNTYLE | KVSNRFS (SEQ | FQGSHVPWT (SEQ ID |
| VL | | | | | (SEQ ID NO: 734) | ID NO: 735) | NO: 736) |
| corresponding | Chothia | | | | RSSQSIVHSNGNTYLE | KVSNRFS (SEQ | FQGSHVPWT (SEQ ID |
| to | | | | | (SEQ ID NO: 734) | ID NO: 735) | NO: 736) |
| SEQ ID | IMGT | | | | QSIVHSNGNTY (SEQ ID | KVS | FQGSHVPWT (SEQ ID |
| NO: 34 | | | | | NO: 737) | | NO: 736) |
| | AbM | | | | RSSQSIVHSNGNTYLE | KVSNRFS (SEQ | FQGSHVPWT (SEQ ID |
| | | | | | (SEQ ID NO: 734) | ID NO: 735) | NO: 736) |
| | Contact | | | | VHSNGNTYLEWY (SEQ | LLIYKVSNRF | FQGSHVPW (SEQ ID |
| | | | | | ID NO: 738) | (SEQ ID NO: | NO: 739) |
| | | | | | | 614) | |
| Mouse 5G8 | Kabat | SYGVH (SEQ ID | VIWSGGSTDYNAAFIS | NPLTATVMDY (SEQ ID | | | |
| VH | | NO: 537) | (SEQ ID NO: 538) | NO: 539) | | | |
| corresponding | Chothia | GFSLISY (SEQ ID | WSGGS (SEQ ID NO: 541) | NPLTATVMDY (SEQ ID | | | |
| to | | NO: 740) | | NO: 539) | | | |
| SEQ ID | IMGT | GFSLISYG (SEQ | IWSGGST (SEQ ID NO: 543) | ARNPLTATVMDY (SEQ | | | |
| NO: 35 | | ID NO: 741) | | ID NO: 544) | | | |
| | AbM | GFSLISYGVH | VIWSGGSTD (SEQ ID NO: | NPLTATVMDY (SEQ ID | | | |
| | | (SEQ ID NO: 742) | 546) | NO: 539) | | | |
| | Contact | ISYGVH (SEQ ID | WLGVIWSGGSTD (SEQ ID | ARNPLTATVMD (SEQ | | | |
| | | NO: 743) | NO: 548) | ID NO: 549) | | | |
| Mouse 5G8 | Kabat | | | | KASQNVGTNVA (SEQ | SASYRDS (SEQ | QQYNSYPLT (SEQ ID |
| VL | | | | | ID NO: 550) | ID NO: 744) | NO: 552) |
| corresponding | Chothia | | | | KASQNVGTNVA (SEQ | SASYRDS (SEQ | QQYNSYPLT (SEQ ID |
| to | | | | | ID NO: 550) | ID NO: 744) | NO: 552) |
| SEQ ID | IMGT | | | | QNVGTN (SEQ ID NO: | SAS | QQYNSYPLT (SEQ ID |
| NO: 36 | | | | | 553) | | NO: 552) |
| | AbM | | | | KASQNVGTNVA (SEQ | SASYRDS (SEQ | QQYNSYPLT (SEQ ID |
| | | | | | ID NO: 550) | ID NO: 744) | NO: 552) |
| | Contact | | | | GTNVAWY (SEQ ID NO: | ALIYSASYRD | QQYNSYPL (SEQ ID |
| | | | | | 554) | (SEQ ID NO: | NO: 556) |
| | | | | | | 745) | |
| Mouse 6B3 | Kabat | | | | SASQGISNYLN (SEQ ID | YTSSLHS (SEQ | QQYSDLPWT (SEQ ID |
| VL | | | | | NO: 665) | ID NO: 746) | NO: 747) |
| corresponding | Chothia | | | | SASQGISNYLN (SEQ ID | YTSSLHS (SEQ | QQYSDLPWT (SEQ ID |
| to | | | | | NO: 665) | ID NO: 746) | NO: 747) |
| SEQ ID | IMGT | | | | QGISNY (SEQ ID NO: | YTS | QQYSDLPWT (SEQ ID |
| NO: 38 | | | | | 668) | | NO: 747) |
| | AbM | | | | SASQGISNYLN (SEQ ID | YTSSLHS (SEQ | QQYSDLPWT (SEQ ID |
| | | | | | NO: 665) | ID NO: 746) | NO: 747) |
| | Contact | | | | SNYLNWY (SEQ ID NO: | LLIYYTSSLH | QQYSDLPW (SEQ ID |
| | | | | | 669) | (SEQ ID NO: | NO: 748) |
| | | | | | | 670) | |
| Mouse 1B2 | Kabat | | | | RSSQSIVHSNGNTYLE | KVSNRFS (SEQ | FQGSHVPYT (SEQ ID |
| VL | | | | | (SEQ ID NO: 734) | ID NO: 735) | NO: 749) |
| corresponding | Chothia | | | | RSSQSIVHSNGNTYLE | KVSNRFS (SEQ | FQGSHVPYT (SEQ ID |
| to | | | | | (SEQ ID NO: 734) | ID NO: 735) | NO: 749) |
| SEQ ID NO: 4 | IMGT | | | | QSIVHSNGNTY (SEQ ID | KVS | FQGSHVPYT (SEQ ID |
| | | | | | NO: 737) | | NO: 749) |
| | AbM | | | | RSSQSIVHSNGNTYLE | KVSNRFS (SEQ | FQGSHVPYT (SEQ ID |
| | | | | | (SEQ ID NO: 734) | ID NO: 735) | NO: 749) |
| | Contact | | | | VHSNGNTYLEWY (SEQ | LLIYKVSNRF | FQGSHVPY (SEQ ID |
| | | | | | ID NO: 738) | (SEQ ID NO: | NO: 750) |
| | | | | | | 614) | |
| Humanized | Kabat | TYAIS (SEQ ID | IIWPGGGTNYADSVKG | GAGTWYFDV (SEQ ID | | | |
| 1C8 VH H5 | | NO: 751) | (SEQ ID NO: 752) | NO: 753) | | | |
| corresponding | Chothia | GFSLTTY (SEQ ID | WPGGG (SEQ ID NO: 656) | GAGTWYFDV (SEQ ID | | | |
| to | | NO: 754) | | NO: 753) | | | |
| SEQ ID | IMGT | GFSLITYA (SEQ | IWPGGGT (SEQ ID NO: | ARGAGTWYFDV (SEQ | | | |
| NO: 45 | | ID NO: 755) | 756) | ID NO: 757) | | | |
| | AbM | GFSLTTYAIS | IIWPGGGTN (SEQ ID NO: | GAGTWYFDV (SEQ ID | | | |
| | | (SEQ ID NO: 758) | 759) | NO: 753) | | | |
| | Contact | TTYAIS (SEQ ID | WVSIIWPGGGTN (SEQ ID | ARGAGTWYFD (SEQ ID | | | |
| | | NO: 760) | NO: 761) | NO: 762) | | | |
| Humanized | Kabat | EFGMH (SEQ ID | YISSGGSTIYYADSVKG | DWVDY (SEQ ID NO: | | | |
| 1G1 VH H1 | | NO: 616) | (SEQ ID NO: 763) | 618) | | | |
| corresponding | Chothia | GFTFSEF (SEQ ID | SSGGST (SEQ ID NO: 764) | DWVDY (SEQ ID NO: | | | |
| to | | NO: 619) | | 618) | | | |
| SEQ ID | IMGT | GFTFSEFG (SEQ | ISSGGSTI (SEQ ID NO: | ARDWVDY (SEQ ID NO: | | | |
| NO: 46 | | ID NO: 621) | 765) | 623) | | | |
| | AbM | GFTFSEFGMH | YISSGGSTIY (SEQ ID NO: | DWVDY (SEQ ID NO: | | | |
| | | (SEQ ID NO: 624) | 766) | 618) | | | |
| | Contact | SEFGMH (SEQ ID | WVSYISSGGSTIY (SEQ ID | ARDWVD (SEQ ID NO: | | | |
| | | NO: 626) | NO: 767) | 628) | | | |
| Humanized | Kabat | SYGVH (SEQ ID | VIWSGGSTDYNPSLKS | NPLTATVMDY (SEQ ID | | | |
| 5G8 VH H1 | | NO: 537) | (SEQ ID NO: 768) | NO: 539) | | | |
| corresponding | Chothia | GFSLISY (SEQ ID | WSGGS (SEQ ID NO: 541) | NPLTATVMDY (SEQ ID | | | |
| to | | NO: 740) | | NO: 539) | | | |
| SEQ ID | IMGT | GFSLISYG (SEQ | IWSGGST (SEQ ID NO: | ARNPLTATVMDY (SEQ | | | |
| NO: 47 | | ID NO: 741) | 543) | ID NO: 544) | | | |
| | Abm | GFSLISYGVH | VIWSGGSTD (SEQ ID NO: | NPLTATVMDY (SEQ ID | | | |
| | | (SEQ ID NO: 742) | 546) | NO: 539) | | | |
| | Contact | ISYGVH (SEQ ID | WIGVIWSGGSTD (SEQ ID | ARNPLTATVMD (SEQ | | | |
| | | NO: 743) | NO: 769) | ID NO: 549) | | | |
| Humanized | Kabat | | | | SASQGISNYLN (SEQ ID | YTSSLHS (SEQ | QQYSKFPWT (SEQ ID |
| 1C8 VL L1 | | | | | NO: 665) | ID NO: 746) | NO: 770) |
| corresponding | Chothia | | | | SASQGISNYLN (SEQ ID | YTSSLHS (SEQ | QQYSKFPWT (SEQ ID |
| to | | | | | NO: 665) | ID NO: 746) | NO: 770) |
| SEQ ID | IMGT | | | | QGISNY (SEQ ID NO: | YTS | QQYSKFPWT (SEQ ID |
| NO: 48 | | | | | 668) | | NO: 770) |
| | AbM | | | | SASQGISNYLN (SEQ ID | YTSSLHS (SEQ | QQYSKFPWT (SEQ ID |
| | | | | | NO: 665) | ID NO: 746) | NO: 770) |
| | Contact | | | | SNYLNWY (SEQ ID NO: | LLIYYTSSLH | QQYSKFPW (SEQ ID |
| | | | | | 669) | (SEQ ID NO: | NO: 771) |
| | | | | | | 670) | |
| Humanized | Kabat | | | | KASENVGSYVS (SEQ ID | GASNRYT | GQSYSYPLT (SEQ ID |
| 1G1 VL L1 | | | | | NO: 510) | (SEQ ID NO: | NO: 512) |
| corresponding | | | | | | 511) | |
| to | Chothia | | | | KASENVGSYVS (SEQ ID | GASNRYT | GQSYSYPLT (SEQ ID |
| SEQ ID | | | | | NO: 510) | (SEQ ID NO: | NO: 512) |
| NO: 49 | | | | | | 511) | |
| | IMGT | | | | ENVGSY (SEQ ID NO: | GAS | GQSYSYPLT (SEQ ID |
| | | | | | 513) | | NO: 512) |
| | AbM | | | | KASENVGSYVS (SEQ ID | GASNRYT | GQSYSYPLT (SEQ ID |
| | | | | | NO: 510) | (SEQ ID NO: | NO: 512) |
| | | | | | | 511) | |
| | Contact | | | | GSYVSWY (SEQ ID NO: | LLIYGASNRY | GQSYSYPL (SEQ ID |
| | | | | | 514) | (SEQ ID NO: | NO: 516) |
| | | | | | | 515) | |
| Mouse 1C3 | Kabat | SYGVH (SEQ ID | VIWRGGSTDYNAAFIS | ENYDYDEFAY (SEQ ID | | | |
| VH | | NO: 537) | (SEQ ID NO: 772) | NO: 773) | | | |
| corresponding | Chothia | GFSLTSY (SEQ ID | WRGGS (SEQ ID NO: 774) | ENYDYDEFAY (SEQ ID | | | |
| to | | NO: 540) | | NO: 773) | | | |
| SEQ ID NO: 5 | IMGT | GFSLTSYG (SEQ | IWRGGST (SEQ ID NO: | ARENYDYDEFAY (SEQ | | | |
| | | ID NO: 542) | 775) | ID NO: 776) | | | |
| | AbM | GFSLTSYGVH | VIWRGGSTD (SEQ ID NO: | ENYDYDEFAY (SEQ ID | | | |
| | | (SEQ ID NO: 545) | 777) | NO: 773) | | | |
| | Contact | TSYGVH (SEQ ID | WLGVIWRGGSTD (SEQ ID | ARENYDYDEFA (SEQ | | | |
| | | NO: 547) | NO: 778) | ID NO: 779) | | | |
| Humanized | Kabat | | | | RASQNVGTNVA (SEQ | SASYRDS (SEQ | QQYNSYPLT (SEQ ID |
| 5G8 VL L1 | | | | | ID NO: 780) | ID NO: 744) | NO: 552) |
| corresponding | Chothia | | | | RASQNVGTNVA (SEQ | SASYRDS (SEQ | QQYNSYPLT (SEQ ID |
| to | | | | | ID NO: 780) | ID NO: 744) | NO: 552) |
| SEQ ID | IMGT | | | | QNVGTN (SEQ ID NO: | SAS | QQYNSYPLT (SEQ ID |
| NO: 50 | | | | | 553) | | NO: 552) |
| | AbM | | | | RASQNVGTNVA (SEQ | SASYRDS (SEQ | QQYNSYPLT (SEQ ID |
| | | | | | ID NO: 780) | ID NO: 744) | NO: 552) |
| | Contact | | | | GTNVAWF (SEQ ID NO: | SLIYSASYRD | QQYNSYPL (SEQ ID |
| | | | | | 781) | (SEQ ID NO: | NO: 556) |
| | | | | | | 782) | |
| Humanized | Kabat | TYAIS (SEQ ID | IIWPGGGTNYADSVKG | GAGTWYFDV (SEQ ID | | | |
| 1C8 VH H6 | | NO: 751) | (SEQ ID NO: 752) | NO: 753) | | | |
| corresponding | Chothia | GFSLTTY (SEQ ID | WPGGG (SEQ ID NO: 656) | GAGTWYFDV (SEQ ID | | | |
| to | | NO: 754) | | NO: 753) | | | |
| SEQ ID | IMGT | GFSLTTYA (SEQ | IWPGGGT (SEQ ID NO: | ARGAGTWYFDV (SEQ | | | |
| NO: 51 | | ID NO: 755) | 756) | ID NO: 757) | | | |
| | AbM | GFSLTTYAIS | IIWPGGGTN (SEQ ID NO: | GAGTWYFDV (SEQ ID | | | |
| | | (SEQ ID NO: 758) | 759) | NO: 753) | | | |
| | Contact | TTYAIS (SEQ ID | WLGIIWPGGGTN (SEQ ID | ARGAGTWYFD (SEQ ID | | | |
| | | NO: 760) | NO: 783) | NO: 762) | | | |
| Humanized | Kabat | TYAIS (SEQ ID | IIWPGGGTNYADSVKG | GAGTWYFDV (SEQ ID | | | |
| 1C8 VH H7 | | NO: 751) | (SEQ ID NO: 752) | NO: 753) | | | |
| corresponding | Chothia | GFSLTTY (SEQ ID | WPGGG (SEQ ID NO: 656) | GAGTWYFDV (SEQ ID | | | |
| to | | NO: 754) | | NO: 753) | | | |
| SEQ ID | IMGT | GFSLTTYA (SEQ | IWPGGGT (SEQ ID NO: | ARGAGTWYFDV (SEQ | | | |
| NO: 52 | | ID NO: 755) | 756) | ID NO: 757) | | | |
| | AbM | GFSLTTYAIS | IIWPGGGTN (SEQ ID NO: | GAGTWYFDV (SEQ ID | | | |
| | | (SEQ ID NO: 758) | 759) | NO: 753) | | | |
| | Contact | TTYAIS (SEQ ID | WLGIIWPGGGTN (SEQ ID | ARGAGTWYFD (SEQ ID | | | |
| | | NO: 760) | NO: 783) | NO: 762) | | | |
| Humanized | Kabat | TYAIS (SEQ ID | IIWPGGGTNYADSLKG | GAGTWYFDV (SEQ ID | | | |
| 1C8 VH H8 | | NO: 751) | (SEQ ID NO: 784) | NO: 753) | | | |
| corresponding | Chothia | GFSLTTY (SEQ ID | WPGGG (SEQ ID NO: 656) | GAGTWYFDV (SEQ ID | | | |
| to | | NO: 754) | | NO: 753) | | | |
| SEQ ID | IMGT | GFSLTTYA (SEQ | IWPGGGT (SEQ ID NO: | ARGAGTWYFDV (SEQ | | | |
| NO: 53 | | ID NO: 755) | 756) | ID NO: 757) | | | |
| | AbM | GFSLTTYAIS | IIWPGGGTN (SEQ ID NO: | GAGTWYFDV (SEQ ID | | | |
| | | (SEQ ID NO: 758) | 759) | NO: 753) | | | |
| | Contact | TTYAIS (SEQ ID | WLGIIWPGGGTN (SEQ ID | ARGAGTWYFD (SEQ ID | | | |
| | | NO: 760) | NO: 783) | NO: 762) | | | |
| Humanized | Kabat | | | | SASQGISNYLN (SEQ ID | YTSSLHS (SEQ | QQYSKFPWT (SEQ ID |
| 1C8 VL L2 | | | | | NO: 665) | ID NO: 746) | NO: 770) |
| corresponding | Chothia | | | | SASQGISNYLN (SEQ ID | YTSSLHS (SEQ | QQYSKFPWT (SEQ ID |
| to | | | | | NO: 665) | ID NO: 746) | NO: 770) |
| SEQ ID | IMGT | | | | QGISNY (SEQ ID NO: | YTS | QQYSKFPWT (SEQ ID |
| NO: 54 | | | | | 668) | | NO: 770) |
| | AbM | | | | SASQGISNYLN (SEQ ID | YTSSLHS (SEQ | QQYSKFPWT (SEQ ID |
| | | | | | NO: 665) | ID NO: 746) | NO: 770) |
| | Contact | | | | SNYLNWY (SEQ ID NO: | LLIYYTSSLH | QQYSKFPW (SEQ ID |
| | | | | | 669) | (SEQ ID NO: | NO: 771) |
| | | | | | | 670) | |
| Humanized | Kabat | | | | SASQGISNYLN (SEQ ID | YTSSLHS (SEQ | QQYSKFPWT (SEQ ID |
| 1C8 VL L3 | | | | | NO: 665) | ID NO: 746) | NO: 770) |
| corresponding | Chothia | | | | SASQGISNYLN (SEQ ID | YTSSLHS (SEQ | QQYSKFPWT (SEQ ID |
| to | | | | | NO: 665) | ID NO: 746) | NO: 770) |
| SEQ ID | IMGT | | | | QGISNY (SEQ ID NO: | YTS | QQYSKFPWT (SEQ ID |
| NO: 55 | | | | | 668) | | NO: 770) |
| | AbM | | | | SASQGISNYLN (SEQ ID | YTSSLHS (SEQ | QQYSKFPWT (SEQ ID |
| | | | | | 665) | ID NO: 746) | NO: 770) |
| | Contact | | | | SNYLNWY (SEQ ID NO: | LLIYYTSSLH | QQYSKFPW (SEQ ID |
| | | | | | 669) | (SEQ ID NO: | NO: 771) |
| | | | | | | 670) | |
| Humanized | Kabat | EFGMH (SEQ ID | YISSGGSTIYYADSVKG | DWVDY (SEQ ID NO: | | | |
| 1G1 VH H2 | | NO: 616) | (SEQ ID NO: 763) | 618) | | | |
| corresponding | Chothia | GFTFSEF (SEQ ID | SSGGST (SEQ ID NO: 764) | DWVDY (SEQ ID NO: | | | |
| to | | NO: 619) | | 618) | | | |
| SEQ ID | IMGT | GFTFSEFG (SEQ | ISSGGSTI (SEQ ID NO: | ARDWVDY (SEQ ID NO: | | | |
| NO: 56 | | ID NO: 621) | 765) | 623) | | | |
| | AbM | GFTFSEFGMH | YISSGGSTIY (SEQ ID NO: | DWVDY (SEQ ID NO: | | | |
| | | (SEQ ID NO: 624) | 766) | 618) | | | |
| | Contact | SEFGMH (SEQ ID | WVAYISSGGSTIY (SEQ ID | ARDWVD (SEQ ID NO: | | | |
| | | NO: 626) | NO: 785) | 628) | | | |
| Humanized | Kabat | EFGMH (SEQ ID | YISSGGSTIYYADSVKG | DWVDY (SEQ ID NO: | | | |
| 1G1 VH H3 | | NO: 616) | (SEQ ID NO: 763) | 618) | | | |
| corresponding | Chothia | GFTFSEF (SEQ ID | SSGGST (SEQ ID NO: 764) | DWVDY (SEQ ID NO: | | | |
| to | | NO: 619) | | 618) | | | |
| SEQ ID | IMGT | GFTFSEFG (SEQ | ISSGGSTI (SEQ ID NO: | ARDWVDY (SEQ ID NO: | | | |
| NO: 57 | | ID NO: 621) | 765) | 623) | | | |
| | AbM | GFTFSEFGMH | YISSGGSTIY (SEQ ID NO: | DWVDY (SEQ ID NO: | | | |
| | | (SEQ ID NO: 624) | 766) | 618) | | | |
| | Contact | SEFGMH (SEQ ID | WVAYISSGGSTIY (SEQ ID | ARDWVD (SEQ ID NO: | | | |
| | | NO: 626) | NO: 785) | 628) | | | |
| Humanized | Kabat | | | | KASENVGSYVS (SEQ ID | GASNRYT | GQSYSYPLT (SEQ ID |
| 1G1 VL L2 | | | | | NO: 510) | (SEQ ID NO: | NO: 512) |
| corresponding | | | | | | 511) | |
| to | Chothia | | | | KASENVGSYVS (SEQ ID | GASNRYT | GQSYSYPLT (SEQ ID |
| SEQ ID | | | | | NO: 510) | (SEQ ID NO: | NO: 512) |
| NO: 58 | | | | | | 511) | |
| | IMGT | | | | ENVGSY (SEQ ID NO: | GAS | GQSYSYPLT (SEQ ID |
| | | | | | 513) | | NO: 512) |
| | AbM | | | | KASENVGSYVS (SEQ ID | GASNRYT | GQSYSYPLT (SEQ ID |
| | | | | | NO: 510) | (SEQ ID NO: | NO: 512) |
| | | | | | | 511) | |
| | Contact | | | | GSYVSWY (SEQ ID NO: | LLIYGASNRY | GQSYSYPL (SEQ ID |
| | | | | | 514) | (SEQ ID NO: | NO: 516) |
| | | | | | | 515) | |
| Humanized | Kabat | | | | KASENVGSYVS (SEQ ID | GASNRYT | GQSYSYPLT (SEQ ID |
| 1G1 VL L3 | | | | | NO: 510) | (SEQ ID NO: | NO: 512) |
| corresponding | | | | | | 511) | |
| to | Chothia | | | | KASENVGSYVS (SEQ ID | GASNRYT | GQSYSYPLT (SEQ ID |
| SEQ ID | | | | | NO: 510) | (SEQ ID NO: | NO: 512) |
| NO: 59 | | | | | | 511) | |
| | IMGT | | | | ENVGSY (SEQ ID NO: | GAS | GQSYSYPLT (SEQ ID |
| | | | | | 513) | | NO: 512) |
| | AbM | | | | KASENVGSYVS (SEQ ID | GASNRYT | GQSYSYPLT (SEQ ID |
| | | | | | NO: 510) | (SEQ ID NO: | NO: 512) |
| | | | | | | 511) | |
| | Contact | | | | GSYVSWY (SEQ ID NO: | LLIYGASNRY | GQSYSYPL (SEQ ID |
| | | | | | 514) | (SEQ ID NO: | NO: 516) |
| | | | | | | 515) | |
| Mouse 1C3 | Kabat | | | | RSSQSIVHSNGNTYLE | KVSNRFS (SEQ | FQGSHVPYT (SEQ ID |
| VL | | | | | (SEQ ID NO: 734) | ID NO: 735) | NO: 749) |
| corresponding | Chothia | | | | RSSQSIVHSNGNTYLE | KVSNRFS (SEQ | FQGSHVPYT (SEQ ID |
| to | | | | | (SEQ ID NO: 734) | ID NO: 735) | NO: 749) |
| SEQ ID NO: 6 | IMGT | | | | QSIVHSNGNTY (SEQ ID | KVS | FQGSHVPYT (SEQ ID |
| | | | | | NO: 737) | | NO: 749) |
| | AbM | | | | RSSQSIVHSNGNTYLE | KVSNRFS (SEQ | FQGSHVPYT (SEQ ID |
| | | | | | (SEQ ID NO: 734) | ID NO: 735) | NO: 749) |
| | Contact | | | | VHSNGNTYLEWY (SEQ | LLIYKVSNRF | FQGSHVPY (SEQ ID |
| | | | | | ID NO: 738) | (SEQ ID NO: | NO: 750) |
| | | | | | | 614) | |
| Humanized | Kabat | | | | KASENVGSYVS (SEQ ID | GASNRYT | GQSYSYPLT (SEQ ID |
| 1G1 VL | | | | | NO: 510) | (SEQ ID NO: | NO: 512) |
| L4 | | | | | | 511) | |
| corresponding | Chothia | | | | KASENVGSYVS (SEQ ID | GASNRYT | GQSYSYPLT (SEQ ID |
| to | | | | | NO: 510) | (SEQ ID NO: | NO: 512) |
| SEQ ID | | | | | | 511) | |
| NO: 60 | IMGT | | | | ENVGSY (SEQ ID NO: | GAS | GQSYSYPLT (SEQ ID |
| | | | | | 513) | | NO: 512) |
| | AbM | | | | KASENVGSYVS (SEQ ID | GASNRYT | GQSYSYPLT (SEQ ID |
| | | | | | NO: 510) | (SEQ ID NO: | NO: 512) |
| | | | | | | 511) | |
| | Contact | | | | GSYVSWY (SEQ ID NO: | LLIYGASNRY | GQSYSYPL (SEQ ID |
| | | | | | 514) | (SEQ ID NO: | NO: 516) |
| | | | | | | 515) | |
| Humanized | Kabat | SYGVH (SEQ ID | VIWSGGSTDYNPSLKS | NPLTATVMDY (SEQ ID | | | |
| 5G8 VH H2 | | NO: 537) | (SEQ ID NO: 768) | NO: 539) | | | |
| corresponding | Chothia | GFSLISY (SEQ ID | WSGGS (SEQ ID NO: 541) | NPLTATVMDY (SEQ ID | | | |
| to | | NO: 740) | | NO: 539) | | | |
| SEQ ID | IMGT | GFSLISYG (SEQ | IWSGGST (SEQ ID NO: | ARNPLTATVMDY (SEQ | | | |
| NO: 61 | | ID NO: 741) | 543) | ID NO: 544) | | | |
| | AbM | GFSLISYGVH | VIWSGGSTD (SEQ ID NO: | NPLTATVMDY (SEQ ID | | | |
| | | (SEQ ID NO: 742) | 546) | NO: 539) | | | |
| | Contact | ISYGVH (SEQ ID | WLGVIWSGGSTD (SEQ ID | ARNPLTATVMD (SEQ | | | |
| | | NO: 743) | NO: 548) | ID NO: 549) | | | |
| Humanized | Kabat | SYGVH (SEQ ID | VIWSGGSTDYNPSLKS | NPLTATVMDY (SEQ ID | | | |
| 5G8 VH H3 | | NO: 537) | (SEQ ID NO: 768) | NO: 539) | | | |
| corresponding | Chothia | GFSLISY (SEQ ID | WSGGS (SEQ ID NO: 541) | NPLTATVMDY (SEQ ID | | | |
| to | | NO: 740) | | NO: 539) | | | |
| SEQ ID | IMGT | GFSLISYG (SEQ | IWSGGST (SEQ ID NO: | ARNPLTATVMDY (SEQ | | | |
| NO: 62 | | ID NO: 741) | 543) | ID NO: 544) | | | |
| | AbM | GFSLISYGVH | VIWSGGSTD (SEQ ID NO: | NPLTATVMDY (SEQ ID | | | |
| | | (SEQ ID NO: 742) | 546) | NO: 539) | | | |
| | Contact | ISYGVH (SEQ ID | WLGVIWSGGSTD (SEQ ID | ARNPLTATVMD (SEQ | | | |
| | | NO: 743) | NO: 548) | ID NO: 549) | | | |
| Humanized | Kabat | SYGVH (SEQ ID | VIWSGGSTDYNPSLKS | NPLTATVMDY (SEQ ID | | | |
| 5G8 VH H4 | | NO: 537) | (SEQ ID NO: 768) | NO: 539) | | | |
| corresponding | Chothia | GFSLISY (SEQ ID | WSGGS (SEQ ID NO: 541) | NPLTATVMDY (SEQ ID | | | |
| to | | NO: 740) | | NO: 539) | | | |
| SEQ ID | IMGT | GFSLISYG (SEQ | IWSGGST (SEQ ID NO: | ARNPLTATVMDY (SEQ | | | |
| NO: 63 | | ID NO: 741) | 543) | ID NO: 544) | | | |
| | AbM | GFSLISYGVH | VIWSGGSTD (SEQ ID NO: | NPLTATVMDY (SEQ ID | | | |
| | | (SEQ ID NO: 742) | 546) | NO: 539) | | | |
| | Contact | ISYGVH (SEQ ID | WLGVIWSGGSTD (SEQ ID | ARNPLTATVMD (SEQ | | | |
| | | NO: 743) | NO: 548) | ID NO: 549) | | | |
| Humanized | Kabat | | | | RASQNVGTNVA (SEQ | SASYRDS (SEQ | QQYNSYPLT (SEQ ID |
| 5G8 VL L2 | | | | | ID NO: 780) | ID NO: 744) | NO: 552) |
| corresponding | Chothia | | | | RASQNVGTNVA (SEQ | SASYRDS (SEQ | QQYNSYPLT (SEQ ID |
| to | | | | | ID NO: 780) | ID NO: 744) | NO: 552) |
| SEQ ID | IMGT | | | | QNVGTN (SEQ ID NO: | SAS | QQYNSYPLT (SEQ ID |
| NO: 64 | | | | | 553) | | NO: 552) |
| | AbM | | | | RASQNVGTNVA (SEQ | SASYRDS (SEQ | QQYNSYPLT (SEQ ID |
| | | | | | ID NO: 780) | ID NO: 744) | NO: 552) |
| | Contact | | | | GTNVAWY (SEQ ID NO: | ALIYSASYRD | QQYNSYPL (SEQ ID |
| | | | | | 554) | (SEQ ID NO: | NO: 556) |
| | | | | | | 745) | |
| Humanized | Kabat | | | | RASQNVGTNVA (SEQ | SASYRDS (SEQ | QQYNSYPLT (SEQ ID |
| 5G8 VL L3 | | | | | ID NO: 780) | ID NO: 744) | NO: 552) |
| corresponding | Chothia | | | | RASQNVGTNVA (SEQ | SASYRDS (SEQ | QQYNSYPLT (SEQ ID |
| to | | | | | ID NO: 780) | ID NO: 744) | NO: 552) |
| SEQ ID | IMGT | | | | QNVGTN (SEQ ID NO: | SAS | QQYNSYPLT (SEQ ID |
| NO: 65 | | | | | 553) | | NO: 552) |
| | AbM | | | | RASQNVGTNVA (SEQ | SASYRDS (SEQ | QQYNSYPLT (SEQ ID |
| | | | | | ID NO: 780) | ID NO: 744) | NO: 552) |
| | Contact | | | | GTNVAWY (SEQ ID NO: | ALIYSASYRD | QQYNSYPL (SEQ ID |
| | | | | | 554) | (SEQ ID NO: | NO: 556) |
| | | | | | | 745) | |
| Humanized | Kabat | | | | RASQNVGTNVA (SEQ | SASYRDS (SEQ | QQYNSYPLT (SEQ ID |
| 5G8 VL L4 | | | | | ID NO: 780) | ID NO: 744) | NO: 552) |
| corresponding | Chothia | | | | RASQNVGTNVA (SEQ | SASYRDS (SEQ | QQYNSYPLT (SEQ ID |
| to | | | | | ID NO: 780) | ID NO: 744) | NO: 552) |
| SEQ ID | IMGT | | | | QNVGTN (SEQ ID NO: | SAS | QQYNSYPLT (SEQ ID |
| NO: 66 | | | | | 553) | | NO: 552) |
| | AbM | | | | RASQNVGTNVA (SEQ | SASYRDS (SEQ | QQYNSYPLT (SEQ ID |
| | | | | | ID NO: 780) | ID NO: 744) | NO: 552) |
| | Contact | | | | GTNVAWY (SEQ ID NO: | ALIYSASYRD | QQYNSYPL (SEQ ID |
| | | | | | 554) | (SEQ ID NO: | NO: 556) |
| | | | | | | 745) | |
| Mouse 1C8 | Kabat | TYAIS (SEQ ID | IIWPGGGTNYNSALKS | GAGTWYFDV (SEQ ID | | | |
| VH | | NO: 751) | (SEQ ID NO: 786) | NO: 753) | | | |
| corresponding | Chothia | GFSLTTY (SEQ ID | WPGGG (SEQ ID NO: 656) | GAGTWYFDV (SEQ ID | | | |
| to | | NO: 754) | | NO: 753) | | | |
| SEQ ID NO: 7 | IMGT | GFSLTTYA (SEQ | IWPGGGT (SEQ ID NO: | ARGAGTWYFDV (SEQ | | | |
| | | ID NO: 755) | 756) | ID NO: 757) | | | |
| | AbM | GFSLTTYAIS | IIWPGGGTN (SEQ ID NO: | GAGTWYFDV (SEQ ID | | | |
| | | (SEQ ID NO: 758) | 759) | NO: 753) | | | |
| | Contact | TTYAIS (SEQ ID | WLGIIWPGGGTN (SEQ ID | ARGAGTWYFD (SEQ ID | | | |
| | | NO: 760) | NO: 783) | NO: 762) | | | |
| Mouse 1C8 | Kabat | | | | SASQGISNYLN (SEQ ID | YTSSLHS (SEQ | QQYSKFPWT (SEQ ID |
| VL | | | | | NO: 665) | ID NO: 746) | NO: 770) |
| corresponding | Chothia | | | | SASQGISNYLN (SEQ ID | YTSSLHS (SEQ | QQYSKFPWT (SEQ ID |
| to | | | | | NO: 665) | ID NO: 746) | NO: 770) |
| SEQ ID NO: 8 | IMGT | | | | QGISNY (SEQ ID NO: | YTS | QQYSKFPWT (SEQ ID |
| | | | | | 668) | | NO: 770) |
| | AbM | | | | SASQGISNYLN (SEQ ID | YTSSLHS (SEQ | QQYSKFPWT (SEQ ID |
| | | | | | NO: 665) | ID NO: 746) | NO: 770) |
| | Contact | | | | SNYLNWY (SEQ ID NO: | LLIYYTSSLH | QQYSKFPW (SEQ ID |
| | | | | | 669) | (SEQ ID NO: | NO: 771) |
| | | | | | | 670) | |
| Mouse 1G1 | Kabat | EFGMH (SEQ ID | YISSGGSTIYYADTVKG | DWVDY (SEQ ID NO: | | | |
| VH | | NO: 616) | (SEQ ID NO: 787) | 618) | | | |
| corresponding | Chothia | GFTFSEF (SEQ ID | SSGGST (SEQ ID NO: 764) | DWVDY (SEQ ID NO: | | | |
| to | | NO: 619) | | 618) | | | |
| SEQ ID NO: 9 | IMGT | GFTFSEFG (SEQ | ISSGGSTI (SEQ ID NO: | ARDWVDY (SEQ ID NO: | | | |
| | | ID NO: 621) | 765) | 623) | | | |
| | AbM | GFTFSEFGMH | YISSGGSTIY (SEQ ID NO: | DWVDY (SEQ ID NO: | | | |
| | | (SEQ ID NO: 624) | 766) | 618) | | | |
| | Contact | SEFGMH (SEQ ID | WVAYISSGGSTIY (SEQ ID | ARDWVD (SEQ ID NO: | | | |
| | | NO: 626) | NO: 785) | 628) | | | |

TABLE 19
VH and VL Composition of Humanized 8K22 antibody Variants

| Variant | | |
|---|---|---|
| No | Description | Composition |
| 23820 | 8K22 rabbit - human | HL |
| | parental chimera | |
| 23794 | Humanized 8K22 variant | H1L1 |
| 23795 | Humanized 8K22 variant | H2L1 |
| 23796 | Humanized 8K22 variant | H3L1 |
| 23797 | Humanized 8K22 variant | H4L1 |
| 23798 | Humanized 8K22 variant | H5L1 |
| 23799 | Humanized 8K22 variant | H1L2 |
| 23800 | Humanized 8K22 variant | H2L2 |
| 23801 | Humanized 8K22 variant | H3L2 |
| 23802 | Humanized 8K22 variant | H4L2 |
| 23803 | Humanized 8K22 variant | H5L2 |
| 23804 | Humanized 8K22 variant | H1L3 |
| 23805 | Humanized 8K22 variant | H2L3 |
| 23806 | Humanized 8K22 variant | H3L3 |
| 23807 | Humanized 8K22 variant | H4L3 |
| 23808 | Humanized 8K22 variant | H5L3 |
| 23809 | Humanized 8K22 variant | H1L4 |
| 23810 | Humanized 8K22 variant | H2L4 |
| 23811 | Humanized 8K22 variant | H3L4 |
| 23812 | Humanized 8K22 variant | H4L4 |
| 23813 | Humanized 8K22 variant | H5L4 |
| 23814 | Humanized 8K22 variant | H1L5 |
| 23815 | Humanized 8K22 variant | H2L5 |
| 23816 | Humanized 8K22 variant | H3L5 |
| 23817 | Humanized 8K22 variant | H4L5 |
| 23818 | Humanized 8K22 variant | H5L5 |

TABLE 20
Amino acid sequences of heavy and light chain humanized 8K22

| SEQ | | |
|---|---|---|
| ID | | |
| NO | DESCRIPTION | SEQUENCE |
| 298 | Rabbit 8K22 heavy chain | Provided in Table 17 |
| | variable domain sequence | |
| | (H) | |
| 306 | Heavy chain rabbit 8K22 | EVQLVESGGGLVQPGGSLRLSCAASGFTISNNYYMCWVRQAPGKGLEWVSCIYGGISGRTYYADSVKG |
| | CDRs ported onto framework | RFTISRDNSKNTLYLQMNSLRAEDTAVYYCARGYVGTSNLWGQGTLVTVSS |
| | of germline | |
| | IGHV3-66*01 (H0) | |
| | (also provided in FIG. 40) | |
| 307 | Humanized 8K22 heavy chain | EVQLVESGGGLVQPGGSLRLSCAASGFTISNNYYMCWVRQAPGKGLEWVSCIYGGISGRTYYADSVKG |
| | variable domain sequence 1 | RFTISKDNSKNTLYLQMNSLRAEDTAVYYCVRGYVGTSNLWGQGTLTVSS |
| | (H1) | |
| | (SEQ ID NO: 307) | |
| 308 | Humanized 8K22 heavy chain | EVQLVESGGGLVQPGGSLRLSCAASGFTISNNYYMCWVRQAPGKGLEWIACIYGGISGRTYYADSAKG |
| | variable domain sequence 2 | RFTISKDNSKNTVYLQMNSLRAEDTAVYYCVRGYVGTSNLWGQGTLVTVSS |
| | (H2) | |
| 309 | Humanized 8K22 heavy chain | EVQLVESGGLVQPGGSLRLSCAASGFTISNNYYMCWVRQAPGKGLEWIACIYGGISGRTYYADSAKG |
| | variable domain sequence 3 | RFTISKDSSKNTVYLQMNSLRAEDTAVYYCVRGYVGTSNLWGQGTLVTVSS |
| | (H3) | |
| 310 | Humanized 8K22 heavy chain | EVQLVESGGGLVQPGGSLRLSCAASGFTISNNYYMCWVRQAPGKGLEWIACIYGGISGRTYYADSAKG |
| | variable domain sequence 4 | RFTISKDSSNTVYLQMNSLRAEDTAVYYCVRGYVGTSNLWGQGTLVTVSS |
| | (H4) | |
| 311 | Humanized 8K22 heavy chain | EVQLVESGGGLVQPGGSLRLSCAASGFTISNNYYMCWVRQAPGKGLEWIACIYGGISGRTYYADWAK |
| | variable domain sequence 5 | GRFTISKDSSKNTVYLQMNSLRAEDTAVYYCVRGYVGTSNLWGQGTLVTVSS |
| | (H5) | |
| 299 | Rabbit 8K22 light chain | Provided in Table 17 |
| | variable domain sequence | |
| | (L) | |
| 312 | Light chain rabbit 8K22 | DIQMTQSPSSLSASVGDRVTITCQASQSIYSSLAWYQQKPGKAPKLLIYDASHLASGVPSRFSGSGSGTD |
| | CDRs ported onto | FTLTISSLQPEDFATYYCQGGWYSSAATYVPNTFGGGTKLEIK |
| | framework of germline | |
| | IGKV1-39*01 (L0) | |
| | (also provided in FIG. 40) | |
| 313 | Humanized 8K22 light chain | DIQMTQSPSSLSASVGDRVTITCQASQSIYSSLAWYQQKPGKAPKLLIYDASHLASGVPSRFSGSGSGTD |
| | variable domain sequence 1 | FTLTISSVQPEDFATYYCQGGWYSSAATYVPNTFGGGTKVEIK |
| | (L1)) | |
| 314 | Humanized 8K22 light chain | DIQMTQSPSSLSASVGDRVTITCQASQSIYSSLAWYQQKPGKAPKLLIYDASHLASGVPSRFSGSGSGTD |
| | variable domain sequence | FTLTISSVQPEDFATYYCQGGWYSSAATYVPNTFGGGTKVEVK |
| | 2(L2) | |
| 315 | Humanized 8K22 light chain | DIQMTQSPSSLSASVGDRVTITCQASQSIYSSLAWYQQKPGKAPKLLIYDASHLASGVPSRFSGSRYGTD |
| | variable domain sequence 3 | FTLTISSVQPEDFATYYCQGGWYSSAATYVPNTFGGGTKVEVK |
| | (L3) | |
| 316 | Humanized 8K22 light chain | DIQMTQSPSSLSASVGDRVTITCQASQSIYSSLAWYQQKPGKAPKLLIYDASHLASGVPSRFSGSGSGTD |
| | variable domain sequence 4 | FTLTISSVQPEDAATYYCQGGWYSSAATYVPNTFGGGTKVEVK |
| | (L4) | |
| 317 | Humanized 8K22 light chain | DIQMTQSPSSLSASVGDRVTITCQASQSIYSSLAWYQQKPGKAPKLLIYDASHLASGVPSRFSGSRYGTD |
| | variable domain sequence 5 | FTLTISSVQPEDAATYYCQGGWYSSAATYVPNTFGGGTKVEVK |
| | (L5) | |
| 67 | Ckappa domain of IGKC*01 | RTVAAPSVFIFPPSDEQLKSGTASVVCLLNNFYPREAKVQWKVDNALQSGNSQESVTEQDSKDSTYSLS |
| | | STLTLSKADYEKHKVYACEVTHQGLSSPVTKSFNRGEC |
| 318 | IgG1 CH1-hinge-CH2-CH3 | ASTKGPSVFPLAPSSKSTSGGTAALGCLVKDYFPEPVTVSWNSGALTSGVHTFPAVLQSSGLYSLSSVVT |
| | (Domain boundaries);, D1- | VPSSSLGTQTYICNVNHKPSNTKVDKKVEPKSCDKTHTCPPCPAPELLGGPSVFLFPPKPKDTLMISRTPE |
| | P10, CH2; A11-K120, CH3; | VTCVVVDVSHEDPEVKFNWYVDGVEVHNAKTKPREEQYNSTYRVVSVLTVLHQDWLNGKEYKCKVSN |
| | G121-G226), includes | KALPAPIEKTISKAKGQPREPQVYTLPPSRDELTKNQVSLTCLVKGFYPSDIAVEWESNGQPENNYKTTP |
| | L234A, L235A, D265S | PVLDSDGSFFLYSKLTVDKSRWQQGNVFSCSVMHEALHNHYTQKSLSLSPG |
| | substitutions | |
| 319 | IgG1 Fc sequence 231-446 | APELLGGPSVFLFPPKPKDTLMISRTPEVTCVVVDVSHEDPEVKFNWYVDGVEVHNAKTKPREEQYNST |
| | (EU-numbering), without | YRVVSVLTVLHQDWLNGKEYKCKVSNKALPAPIEKTISKAKGQPREPQVYTLPPSRDELTKNQVSLTCLV |
| | hinge, includes L234A, | KGFYPSDIAVEWESNGQPENNYKTTPPVLDSDGSFFLYSKLTVDKSRWQQGNVFSCSVMHEALHNHY |
| | L235A, D265S substitutions | TQKSLSLSPG |

TABLE 21
Antigen binding assessment of the humanized
8K22 antibody variants by Octet

| | | Supernatant | Purified (n = 2) | |
|---|---|---|---|---|
| Variant | | (n = 1) | Average | STDev |
| No | Description | KD (M) | KD (M) | KD (M) |
| 23820 | 8K22 rabbit-human | 5.94E−09 | 4.11E−09 | 3.08E−10 |
| | parental chimera | | | |
| 23794 | Humanized 8K22 variant | 1.51E−08 | 7.36E−09 | 6.17E−10 |
| 32795 | Humanized 8K22 variant | 3.57E−08 | ND | ND |
| 23796 | Humanized 8K22 variant | 2.22E−08 | 1.12E−08 | 3.88E−09 |
| 23797 | Humanized 8K22 variant | 1.49E−08 | 1.19E−08 | 2.89E−09 |
| 23798 | Humanized 8K22 variant | 1.19E−08 | 6.85E−09 | 2.42E−09 |
| 23799 | Humanized 8K22 variant | 1.38E−08 | 4.8E−09 | 9.85E−10 |
| 23800 | Humanized 8K22 variant | 3.65E−08 | ND | ND |
| 23801 | Humanized 8K22 variant | 2.21E−08 | 8.66E−09 | 7.19E−10 |
| 23802 | Humanized 8K22 variant | 1.79E−08 | 8.53E−09 | 2.62E−09 |
| 23803 | Humanized 8K22 variant | 3.17E−08 | ND | ND |
| 23804 | Humanized 8K22 variant | 9.29E−09 | 4.66E−09 | 1.5E−09 |
| 23805 | Humanized 8K22 variant | 1.62E−08 | 1.02E−08 | 2.64E−09 |
| 23806 | Humanized 8K22 variant | 1.15E−08 | 7.00E−09 | 4.55E−10 |
| 23807 | Humanized 8K22 variant | 1.09E−08 | 7.07E−09 | 7.64E−10 |
| 23808 | Humanized 8K22 variant | 1.93E−08 | 1.31E−08 | 7.78E−10 |
| 23809 | Humanized 8K22 variant | 1.21E−08 | 9.03E−09 | 3.63E−10 |
| 23810 | Humanized 8K22 variant | 3.5E−08 | ND | ND |
| 23811 | Humanized 8K22 variant | 2.25E−08 | 8.83E−09 | 5.69E−09 |
| 23812 | Humanized 8K22 variant | 1.95E−08 | 8.74E−09 | 3.42E−09 |
| 23813 | Humanized 8K22 variant | 3.46E−08 | ND | ND |
| 23814 | Humanized 8K22 variant | 1.01E−08 | 6.31E−09 | 2.64E−10 |
| 23815 | Humanized 8K22 variant | 1.67E−08 | 1.65E−08 | 5.11E−09 |
| 23816 | Humanized 8K22 variant | 1.04E−08 | 1.06E−08 | 2.98E−09 |
| 23817 | Humanized 8K22 variant | 9.5E−09 | 6.41E−09 | 1.23E−09 |
| 23818 | Humanized 8K22 variant | 1.74E−08 | 6.13E−09 | 2.61E−09 |

ND—not determined

TABLE 22
Thermal stability assessment of the humanized
8K22 antibody variants by DSC

| Variant | | |
|---|---|---|
| No. | Description | Fab Tm (° C.) |
| 23820 | 8K22 rabbit-human | 69.16 |
| | parental chimera | |
| 23794 | Humanized 8K22 variant | 74.21 |
| 23795 | Humanized 8K22 variant | ND |
| 23796 | Humanized 8K22 variant | 71.0, 76.61* |
| 23797 | Humanized 8K22 variant | 75.51 |
| 23798 | Humanized 8K22 variant | 72.61, 77.5* |
| 23799 | Humanized 8K22 variant | 72.99 |
| 23800 | Humanized 8K22 variant | ND |
| 23801 | Humanized 8K22 variant | 70.0, 75.56* |
| 23802 | Humanized 8K22 variant | 74.56 |
| 23803 | Humanized 8K22 variant | ND |
| 23804 | Humanized 8K22 variant | 69.88 |
| 23805 | Humanized 8K22 variant | 71.37 |
| 23806 | Humanized 8K22 variant | 71.2 |
| 23807 | Humanized 8K22 variant | 70.46 |
| 23808 | Humanized 8K22 variant | 69.55 |
| 23809 | Humanized 8K22 variant | 77.35 |
| 23810 | Humanized 8K22 variant | ND |
| 23811 | Humanized 8K22 variant | 81.07 |
| 23812 | Humanized 8K22 variant | 79.18 |
| 23813 | Humanized 8K22 variant | ND |
| 23814 | Humanized 8K22 variant | 73.91 |
| 23815 | Humanized 8K22 variant | 75.84 |
| 23816 | Humanized 8K22 variant | 75.48 |
| 23817 | Humanized 8K22 variant | 75.19 |
| 23818 | Humanized 8K22 variant | 71.41, 75.0* |

ND—not determined,
*exhibited two-state transition

TABLE X
Variant Clone Composition

| Variant | H1 clone # | L1 clone # | H2 clone # | L2 clone # |
|---|---|---|---|---|
| 12592 | 2871 | 2872 | 4667 | 2872 |
| 13725 | 8656 | 8653 | 8659 | 8653 |
| 16976 | 10619 | 8653 | 10620 | 8653 |
| 19353 | 13401 | 11150 | 13401 | 11150 |
| 20021 | 14385 | 14402 | 14385 | 14402 |
| 20022 | 14386 | 14471 | 14386 | 14471 |
| 20023 | 14387 | 14409 | 14387 | 14409 |
| 20024 | 14388 | 14404 | 14388 | 14404 |
| 20025 | 14389 | 14405 | 14389 | 14405 |
| 20026 | 14390 | 14406 | 14390 | 14406 |
| 20027 | 14391 | 14407 | 14391 | 14407 |
| 20028 | 14392 | 14408 | 14392 | 14408 |
| 20029 | 14393 | 14409 | 14393 | 14409 |
| 20030 | 14394 | 14410 | 14394 | 14410 |
| 20031 | 14395 | 14408 | 14395 | 14408 |
| 20032 | 14396 | 14411 | 14396 | 14411 |
| 20033 | 14397 | 14412 | 14397 | 14412 |
| 20034 | 14398 | 14413 | 14398 | 14413 |
| 20035 | 14399 | 14414 | 14399 | 14414 |
| 20036 | 14400 | 14415 | 14400 | 14415 |
| 20037 | 14401 | 14416 | 14401 | 14416 |
| 22639 | 8021 | 8022 | 16833 | 8022 |
| 23646 | 18509 | 14471 | 18519 | 14471 |
| 23649 | 18512 | 14415 | 18522 | 14415 |
| 23651 | 18524 | 14471 | 18519 | 14471 |
| 23656 | 18552 | 14471 | 18519 | 14471 |
| 23657 | 18553 | 14405 | 18520 | 14405 |
| 23658 | 18554 | 14411 | 18521 | 14411 |
| 23659 | 18555 | 14415 | 18522 | 14415 |
| 23660 | 18556 | 14416 | 18523 | 14416 |
| 23661 | 18557 | 14471 | 18519 | 14471 |
| 23662 | 18558 | 14405 | 18520 | 14405 |
| 23663 | 18559 | 14411 | 18521 | 14411 |
| 23664 | 18560 | 14415 | 18522 | 14415 |
| 23665 | 18561 | 14416 | 18523 | 14416 |
| 28683 | 20894 | 20897 | 20894 | 20897 |
| 28684 | 20894 | 20898 | 20894 | 20898 |
| 28685 | 20894 | 20899 | 20894 | 20899 |
| 28686 | 20894 | 20900 | 20894 | 20900 |
| 28687 | 20895 | 20897 | 20895 | 20897 |
| 28688 | 20895 | 20898 | 20895 | 20898 |
| 28689 | 20895 | 20899 | 20895 | 20899 |
| 28690 | 20895 | 20900 | 20895 | 20900 |
| 28691 | 20896 | 20897 | 20896 | 20897 |
| 28692 | 20896 | 20898 | 20896 | 20898 |
| 28693 | 20896 | 20899 | 20896 | 20899 |
| 28694 | 20896 | 20900 | 20896 | 20900 |
| 28695 | 20901 | 20905 | 20901 | 20905 |
| 28696 | 20901 | 20906 | 20901 | 20906 |
| 28697 | 20901 | 20907 | 20901 | 20907 |
| 28698 | 20901 | 20908 | 20901 | 20908 |
| 28699 | 20902 | 20905 | 20902 | 20905 |
| 28700 | 20902 | 20906 | 20902 | 20906 |
| 28701 | 20902 | 20907 | 20902 | 20907 |
| 28702 | 20902 | 20908 | 20902 | 20908 |
| 28703 | 20903 | 20905 | 20903 | 20905 |
| 28704 | 20903 | 20906 | 20903 | 20906 |
| 28705 | 20903 | 20907 | 20903 | 20907 |
| 28706 | 20903 | 20908 | 20903 | 20908 |
| 28707 | 20904 | 20905 | 20904 | 20905 |
| 28711 | 20904 | 20906 | 20904 | 20906 |
| 28712 | 20904 | 20907 | 20904 | 20907 |
| 28713 | 20904 | 20908 | 20904 | 20908 |
| 28717 | 21112 | 20891 | 21112 | 20891 |
| 28719 | 21112 | 20892 | 21112 | 20892 |
| 28720 | 21112 | 20893 | 21112 | 20893 |
| 28721 | 21113 | 20891 | 21113 | 20891 |
| 28722 | 21113 | 20892 | 21113 | 20892 |
| 28723 | 21113 | 20893 | 21113 | 20893 |
| 28724 | 21114 | 20891 | 21114 | 20891 |
| 28725 | 21114 | 20892 | 21114 | 20892 |
| 28726 | 21114 | 20893 | 21114 | 20893 |
| 28727 | 21115 | 20891 | 21115 | 20891 |
| 28728 | 21115 | 20892 | 21115 | 20892 |
| 28730 | 21115 | 20893 | 21115 | 20893 |
| 16675 | 10443 | 8022 | 8021 | 8022 |
| 16679 | 10445 | 8022 | 8021 | 8022 |
| 22630 | 16870 | 8022 | 8021 | 8022 |
| 22635 | 16840 | 8022 | 8021 | 8022 |
| 22636 | 16841 | 8022 | 8021 | 8022 |
| 22638 | 16843 | 8022 | 8021 | 8022 |
| 22329 | 16855 | 8022 | 16833 | 8022 |
| 22341 | 16861 | 8022 | 16839 | 8022 |
| 22345 | 16863 | 8022 | 16841 | 8022 |
| 22353 | 16866 | 8022 | 16870 | 8022 |

TABLE XI
Variant Clone Composition

| Variant | H1 clone # | L1 clone # | H2 clone # | L2 clone # | L3 clone # |
|---|---|---|---|---|---|
| 31330 | 22776 | 20898 | 22777 | 20898 | |
| 31331 | 22775 | 20898 | 21709 | 20898 | |
| 31332 | 22776 | 20898 | 21709 | 20898 | |
| 31333 | 22776 | 20898 | 22782 | | |
| 31334 | 22043 | 20898 | 22782 | | |
| 31335 | 22776 | 20898 | 12153 | | |
| 31354 | 22789 | 20898 | 21709 | 20898 | |
| 31362 | 22791* | 20898 | 21709 | 20898 | 21663** |
| 30035 | 21708 | 20891 | 21828 | | |

*N-terminus heavy chain attached to a C-terminus light chain
**This clone is a heavy chain Fab. It should pair with the C-terminus light chain of the H1 clone

TABLE Y
Sequences

| SEQ | | |
|---|---|---|
| ID | Description or | |
| NO: | clone number | Sequence |
| 70 | Human 4-1BB_Fc | GLQDPCSNCPAGTFCDNNRNQICSPCPPNSFSSAGGQRTCDICRQCKGVFRT |
| | | RKECSSTSNAECDCTPGFHCLGAGCSMCEQDCKQGQELTKKGCKDCCFGT |
| | | FNDQKRGICRPWTNCSLDGKSVLVNGTKERDVVCGPSPADLSPGASSVTPP |
| | | APAREPGHSPQDIEGRMDPKSCDKTHTCPPCPAPELLGGPSVFLFPPKPKDT |
| | | LMISRTPEVTCVVVDVSHEDPEVKFNWYVDGVEVHNAKTKPREEQYNSTY |
| | | RVVSVLTVLHQDWLNGKEYKCKVSNKALPAPIEKTISKAKGIPREPQVYT |
| | | LPPSRDELTKNQVSLTCLVKGFYPSDIAVEWESNGQPENNYKTTPPVLDSD |
| | | GSFFLYSKLTVDKSRWQQGNVFSCSVMHEALHNHYTQKSLSLSPGKGGHH |
| | | HHHHHHHH |
| 79 | human 4-1BB | MGNSCYNIVATLLLVLNFERTRSLQDPCSNCPAGTFCDNNRNQICSPCPPNS |
| | polypeptide | FSSAGGQRTCDICRQCKGVFRTRKECSSTSNAECDCTPGFHCLGAGCSMCE |
| | (Uniprot | QDCKQGQELTKKGCKDCCFGTFNDQKRGICRPWTNCSLDGKSVLVNGTK |
| | Accession No. | ERDVVCGPSPADLSPGASSVTPPAPAREPGHSPQIISFFLALTSTALLFLLFFL |
| | Q07011) | TLRFSVVKRGRKKLLYIFKQPFMRPVQTTQEEDGCSCRFPEEEEGGCEL |
| 80 | human FRα | MAQRMTTQLLLLLVWVVAVVGEAQTRIAWARTELLNVCMNAKHHKEKPG |
| | polypeptide | PEDKLHEQCRPWRKNACCSTNTSQEAHKDVSYLYRFNWNHCGEMAPACK |
| | (UniProt | RHFIQDTCLYECSPNLGPWIQQVDQSWRKERVLNVPLCKEDCEQWWEDCR |
| | Accession No. | TSYTCKSNWHKGWNWTSGFNKCAVGAACQPFHFYFPTPTVLCNEIWTHS |
| | P15328) | YKVSNYSRGSGRCIQMWFDPAQGNPNEEVARFYAAAMSGAGPWAAWPFL |
| | | LSLALMLLWLLS |
| 81 | human NaPi2b | MAPWPELGDAQPNPDKYLEGAAGQQPTAPDKSKETNKTDNTEAPVTKIEL |
| | polypeptide | LPSYSTATLIDEPTEVDDPWNLPTLQDSGIKWSERDTKGKILCFFQGIGRLIL |
| | (UniProt | LLGFLYFFVCSLDILSSAFQLVGGKMAGQFFSNSSIMSNPLLGLVIGVLVTV |
| | Accession No. | LVQSSSTSTSIVVSMVSSSLLTVRAAIPIIMGANIGTSITNTIVALMQVGDRSE |
| | O95436) | FRRAFAGATVHDFFNWLSVLVLLPVEVATHYLEIITQLIVESFHFKNGEDAP |
| | | DLLKVITKPFTKLIVQLDKKVISQIAMNDEKAKNKSLVKIWCKTFTNKTQIN |
| | | VTVPSTANCTSPSLCWTDGIQNWTMKNVTYKENIAKCQHIFVNFHLPDLA |
| | | VGTILLILSLLVLCGCLIMIVKILGSVLKGQVATVIKKTINTDFPFPFAWLTG |
| | | YLAILVGAGMTFIVQSSSVFTSALTPLIGIGVITIERAYPLTLGSNIGTTTTAIL |
| | | AALASPGNALRSSLQIALCHFFFNISGILLWYPIPFTRLPIRMAKGLGNISAK |
| | | YRWFAVFYLIIFFFLIPLTVFGLSLAGWRVLVGVGVPVVFIIILVLCLRLLQS |
| | | RCPRVLPKKLQNWNFLPLWMRSLKPWDAVVSKFTGCFQMRCCCCCRVCC |
| | | RACCLLCDCPKCCRCSKCCEDLEEAQEGQDVPVKAPETFDNITISREAQGE |
| | | VPASDSKTECTAL |
| 82 | human HER2 | MELAALCRWGLLLALLPPGAASTQVCTGTDMKLRLPASPETHLDMLRHLY |
| | polypeptide | QGCQVVQGNLELTYLPTNASLSFLQDIQEVQGYVLIAHNQVRQVPLQRLRI |
| | (UniProt | VRGTQLFEDNYALAVLDNGDPLNNTTPVTGASPGGLRELQLRSLTEILKGG |
| | Accession No. | VLIQRNPQLCYQDTILWKDIFHKNNQLALTLIDTNRSRACHPCSPMCKGSR |
| | P04626) | CWGESSEDCQSLTRTVCAGGCARCGPLPTDCCHEQCAAGCTGPKHSDCL |
| | | ACLHFNHSGICELHCPALVTYNTDTFESMPNPEGRYTFGASCVTACPYNYL |
| | | STDVGSCTLVCPLHNQEVTAEDGTQRCEKCSKPCARVCYGLGMEHLREVR |
| | | AVTSANIQEFAGCKKIFGSLAFLPESFDGDPASNTAPLQPEQLQVFETLEEIT |
| | | GYLYISAWPDSLPDLSVFQNLQVIRGRILHNGAYSLTLQGLGISWLGLRSLR |
| | | ELGSGLALIHHNTHLCFVHTVPWDQLFRNPHQALLHTANRPEDECVGEGL |
| | | ACHQLCARGHCWGPGPTQCVNCSQFLRGQECVEECRVLQGLPREYVNAR |
| | | HCLPCHPECQPQNGSVTCFGPEADQCVACAHYKDPPFCVARCPSGVKPDLS |
| | | YMPIWKFPDEEGACQPCPINCTHSCVDLDDKGCPAEQRASPLTSIISAVVGI |
| | | LLVVVLGVVFGILIKRRQQKIRKYTMRRLLQETELVEPLTPSGAMPNQAQM |
| | | RILKETELRKVKVLGSGAFGTVYKGIWIPDGENVKIPVAIKVLRENTSPKAN |
| | | KEILDEAYVMAGVGSPYVSRLLGICLTSTVQLVTQLMPYGCLLDHVRENR |
| | | GRLGSQDLLNWCMQIAKGMSYLEDVRLVHRDLAARNVLVKSPNHVKITD |
| | | FGLARLLDIDETEYHADGGKVPIKWMALESILRRRFTHQSDVWSYGVTVW |
| | | ELMTFGAKPYDGIPAREIPDLLEKGERLPQPPICTIDVYMIMVKCWMIDSEC |
| | | RPRFRELVSEFSRMARDPQRFVVIQNEDLGPASPLDSTFYRSLLEDDDMGD |
| | | LVDAEEYLVPQQGFFCPDPAPGAGGMVHHRHRSSSTRSGGGDLTLGLEPSE |
| | | EEAPRSPLAPSEGAGSDVFDGDLGMGAAKGLQSLPTHDPSPLQRYSEDPTV |
| | | PLPSETDGYVAPLTCSPQPEYVNQPDVRPQPPSPREGPLPAARPAGATLERP |
| | | KTLSPGKNGVVKDVAFGGAVENPEYLTPQGGAAPQPHPPPAFSPAFDNLY |
| | | YWDQDPPERGAPPSTFKGTPTAENPEYLGLDVPV |
| 83 | human LIV-1 | MARKLSVILILTFALSVTNPLHELKAAAFPQTTEKISPNWESGINVDLAISTR |
| | polypeptide | QYHLQQLFYRYGENNSLSVEGFRKLLQNIGIDKIKRIHIHHDHDHHSDHEH |
| | (UniProt | HSDHERHSDHEHHSEHEHHSDHDHHSHHNHAASGKNKRKALCPDHDSDS |
| | Accession No. | SGKDPRNSQGKGAHRPEHASGRRNVKDSVSASEVTSTVYNTVSEGTHFLE |
| | Q13433) | TIETPRPGKLFPKDVSSSTPPSVTSKSRVSRLAGRKTNESVSEPRKGFMYSRN |
| | | TNENPQECFNASKLLTSHGMGIQVPLNATEFNYLCPAIINQIDARSCLIHTSE |
| | | KKAEIPPKTYSLQIAWVGGFIAISIISFLSLLGVILVPLMNRVFFKFLLSFLVA |
| | | LAVGTLSGDAFLHLLPHSHASHHHSHSHEEPAMEMKRGPLFSHLSSQNIEE |
| | | SAYFDSTWKGLTALGGLYFMFLVEHVLTLIKQFKDKKKKNQKKPENDDD |
| | | VEIKKQLSKYESQLSTNEEKVDTDDRTEGYLRADSQEPSHFDSQQPAVLEE |
| | | EEVMIAHAHPQEVYNEYVPRGCKNKCHSHFHDTLGQSDDLIHHHHDYHHI |
| | | LHHHHHQNHHPHSHSQRYSREELKDAGVATLAWMVIMGDGLHNFSDGLA |
| | | IGAAFTEGLSSGLSTSVAVFCHELPHELGDFAVLLKAGMTVKQAVLYNALS |
| | | AMLAYLGMATGIFIGHYAENVSMWIFALTAGLFMYVALVDMVPEMLHND |
| | | ASDHGCSRWGYFFLQNAGMLLGFGIMLLISIFEHKIVFRINF |
| 84 | Mesothelin | MALPTARPLLGSCGTPALGSLLFLLFSLGWVQPSRTLAGETGQEAAPLDGV |
| | polypeptide | LANPPNISSLSPRQLLGFPCAEVSGLSTERVRELAVALAQKNVKLSTEQLRC |
| | (UniProt | LAHRLSEPPEDLDALPLDLLLFLNPDAFSGPQACTRFFSRITKANVDLLPRG |
| | Accession No. | APERQRLLPAALACWGVRGSLLSEADVRALGGLACDLPGRFVAESAEVLL |
| | Q13421) | PRLVSCPGPLDQDQQEAARAALQGGGPPYGPPSTWSVSTMDALRGLLPVL |
| | | GQPIIRSIPQGIVAAWRQRSSRDPSWRQPERTILRPRFRREVEKTACPSGKKA |
| | | REIDESLIFYKKWELEACVDAALLATQMDRVNAIPFTYEQLDVLKHKLDEL |
| | | YPQGYPESVIQHLGYLFLKMSPEDIRKWNVTSLETLKALLEVNKGHEMSPQ |
| | | APRRPLPQVATLIDRFVKGRGQLDKDTLDTLTAFYPGYLCSLSPEELSSVPP |
| | | SSIWAVRPQDLDTCDPRQLDVLYPKARLAFQNMNGSEYFVKIQSFLGGAPT |
| | | EDLKALSQQNVSMDLATFMKLRTDAVLPLTVAEVQKLLGPHVEGLKAEER |
| | | HRPVRDWILRQRQDDLDTLGLGLQGGIPNGYLVLDLSMQEALSGTPCLLGP |
| | | GPVLTVLALLLASTLA |
| 86 | 13401 | EVQLVESGGGLVQPGGSLRLSCAASGFNIKDTYIHWVRQAPGKGLEWVAR |
| | | IYPTNGYTRYADSVKGRFTISADTSKNTAYLQMNSLRAEDTAVYYCSRWG |
| | | GDGFYAMDYWGQGTLVTVSSASTKGPSVFPLAPCSRSTSESTAALGCLVK |
| | | DYFPEPVTVSWNSGALTSGVHTFPAVLQSSGLYSLSSVVTVPSSSLGTKTYT |
| | | CNVDHKPSNTKVDKRVESKYGPPCPPCPAPEAAGGPSVFLFPPKPKDTLMIS |
| | | RTPEVTCVVVDVSQEDPEVQFNWYVDGVEVHNAKTKPREEQFNSTYRVV |
| | | SVLTVLHQDWLNGKEYKCKVSNKGLPSSIEKTISKAKGQPREPQVYTLPPS |
| | | QEEMTKNQVSLTCLVKGFYPSDIAVEWESNGQPENNYKTTPPVLDSDGSFF |
| | | LYSRLTVDKSRWQEGNVFSCSVMHEALHNHYTQKSLSLSLGKGGGGSGG |
| | | GGSGGGGSQDSTSDLIPAPPLSKVPLQQNFQDNQFHGKWYVVGQAGNIRL |
| | | REDKDPIKMMATIYELKEDKSYDVTMVKFDDKKCMYDIWTFVPGSQPGEF |
| | | TLGKIKSFPGHTSSLVRVVSTNYNQHAMVFFKFVFQNREEFYITLYGRTKEL |
| | | TSELKENFIRFSKSLGLPENHIVFPVPIDQCIDG |
| 87 | 13401 | GAGGTGCAGCTGGTGGAGAGCGGCGGCGGCCTGGTGCAGCCCGGCGGC |
| | | TCTCTGCGGCTGAGCTGCGCCGCCTCCGGCTTTAACATCAAGGACACAT |
| | | ACATCCACTGGGTGCGGCAGGCCCCCGGCAAGGGCCTGGAGTGGGTGG |
| | | CCAGAATCTATCCTACCAATGGCTACACACGGTATGCCGACTCCGTGAA |
| | | GGGCAGATTCACCATCTCTGCCGATACCAGCAAGAACACAGCCTACCTG |
| | | CAGATGAACAGCCTGCGGGCCGAGGATACAGCCGTGTACTATTGTTCTC |
| | | GCTGGGGCGGCGACGGCTTTTACGCCATGGATTATTGGGGCCAGGGCAC |
| | | CCTGGTGACAGTGAGCTCCGCTAGCACAAAAGGACCCTCTGTCTTTCCA |
| | | CTGGCACCCTGCTCACGATCAACCTCTGAATCAACCGCCGCTCTGGGAT |
| | | GTCTGGTCAAGGACTACTTCCCCGAGCCTGTGACCGTGTCTTGGAACAG |
| | | CGGGGCCCTGACCAGCGGAGTGCACACCTTTCCCGCCGTGCTGCAGAGC |
| | | TCCGGCCTGTACTCTCTGTCTAGCGTGGTGACAGTGCCTTCCTCTAGCCT |
| | | GGGCACCAAGACATATACCTGCAACGTGGACCACAAGCCAAGCAATAC |
| | | CAAGGTCGACAAGCGGGTGGAGTCCAAGTACGGACCACCTTGCCCACC |
| | | ATGTCCGGCGCCAGAGGCCGCCGGAGGACCTAGCGTGTTCCTGTTTCCT |
| | | CCAAAGCCAAAGGACACACTGATGATCAGCAGAACACCAGAGGTGACC |
| | | TGCGTGGTGGTGGACGTGTCCCAGGAGGACCCCGAGGTGCAGTTCAACT |
| | | GGTACGTGGATGGCGTGGAGGTGCACAATGCCAAGACCAAGCCCAGAG |
| | | AGGAGCAGTTTAATAGCACATACAGAGTGGTGTCCGTGCTGACCGTGCT |
| | | GCACCAGGACTGGCTGAACGGCAAGGAGTATAAGTGCAAGGTGTCTAA |
| | | TAAGGGCCTGCCTTCCTCTATCGAGAAGACAATCAGCAAGGCCAAGGG |
| | | CCAGCCTCGCGAACCACAGGTGTACACCCTGCCCCCTTCTCAGGAGGAG |
| | | ATGACAAAGAACCAGGTGAGCCTGACCTGTCTGGTGAAGGGCTTCTATC |
| | | CCTCCGACATCGCCGTGGAGTGGGAGTCTAATGGCCAGCCTGAGAACA |
| | | ATTACAAGACCACACCACCCGTGCTGGACTCCGATGGCTCTTTCTTTCTG |
| | | TATTCTAGGCTGACAGTGGATAAGAGCCGCTGGCAGGAGGGCAACGTG |
| | | TTTTCTTGCAGCGTGATGCACGAGGCCCTGCACAATCACTACACCCAGA |
| | | AGTCCCTGAGCTTAAGCCTGGGCAAGGGAGGAGGAGGCAGCCTGCCTGAG |
| | | GAGGCTCCGGCGGCGGCGGCTCTCAGGACTCCACCTCTGATCTGATCCC |
| | | AGCCCCTCCACTGTCCAAGGTGCCCCTGCAGCAGAACTTCCAGGACAAT |
| | | CAGTTTCACGGCAAGTGGTACGTGGTGGGCCAGGCCGGAAACATCCGG |
| | | CTGAGAGAGGACAAGGACCCCATCAAGATGATGGCCACAATCTACGAG |
| | | CTGAAGGAGGACAAGAGCTATGATGTGACCATGGTGAAGTTCGACGAT |
| | | AAGAAGTGTATGTACGATATCTGGACATTTGTGCCAGGCTCCCAGCCTG |
| | | GAGAGTTCACCCTGGGCAAGATCAAGTCTTTTCCTGGCCACACAAGCTC |
| | | CCTGGTGAGGGTGGTGTCCACCAACTATAATCAGCACGCCATGGTGTTC |
| | | TTTAAGTTCGTGTTTCAGAACAGGGAGGAGTTCTACATCACCCTGTATG |
| | | GCCGCACAAAGGAGCTGACCAGCGAGCTGAAGGAGAATTTCATCCGCT |
| | | TTAGCAAGTCCCTGGGGCTGCCAGAGAACCACATTGTCTTTCCAGTGCC |
| | | TATTGACCAGTGTATTGATGGG |
| 88 | 14385 | QVQLKQSGPGLVQPSQSLSITCTVSGFSLTSYGVHWVRQSPGKGLEWLGVI |
| | | WRGGSTDYNAAFISRLSISKDNSKSQVFFKMNSLQADDTAIYYCARENYDY |
| | | DEFAYWGQGTLVTVSAASTKGPSVFPLAPSSKSTSGGTAALGCLVKDYFPE |
| | | PVTVSWNSGALTSGVHTFPAVLQSSGLYSLSSVVTVPSSSLGTQTYICNVNH |
| | | KPSNTKVDKKVEPKSCDKTHTCPPCPAPEAAGGPSVFLFPPKPKDTLMISRT |
| | | PEVTCVVVSVSHEDPEVKFNWYVDGVEVHNAKTKPREEQYNSTYRVVSV |
| | | LTVLHQDWLNGKEYKCKVSNKALPAPIEKTISKAKGQPREPQVYTLPPSRD |
| | | ELTKNQVSLTCLVKGFYPSDIAVEWESNGQPENNYKTTPPVLDSDGSFFLY |
| | | SKLTVDKSRWQQGNVFSCSVMHEALHNHYTQKSLSLSPG |
| 89 | 14385 | CAGGTGCAGCTGAAGCAGAGCGGCCCCGGCCTGGTGCAGCCTAGCCAG |
| | | TCCCTGTCTATCACCTGCACAGTGTCCGGCTTCTCTCTGACCAGCTACGG |
| | | AGTGCACTGGGTGCGGCAGTCCCCAGGCAAGGGCCTGGAGTGGCTGGG |
| | | CGTGATCTGGAGGGGAGGCTCCACAGACTATAACGCCGCCTTTATCTCT |
| | | AGACTGAGCATCTCCAAGGATAACTCTAAGAGCCAGGTGTTCTTTAAGA |
| | | TGAACAGCCTGCAGGCCGACGATACAGCCATCTACTATTGTGCCAGGGA |
| | | GAATTACGACTATGATGAGTTTGCCTACTGGGGCCAGGGCACCCTGGTG |
| | | ACAGTGTCCGCCGCTAGCACAAAGGGCCCCTCCGTGTTTCCTCTGGCCC |
| | | CATCCTCTAAGTCCACCTCTGGAGGAACAGCCGCCCTGGGCTGTCTGGT |
| | | GAAGGATTACTTCCCTGAGCCAGTGACCGTGTCCTGGAACTCTGGGGCC |
| | | CTGACCAGCGGAGTGCACACATTTCCCGCCGTGCTGCAGAGCTCCGGAC |
| | | TGTACTCCCTGTCTAGCGTGGTGACCGTGCCTTCCTCTAGCCTGGGCACC |
| | | CAGACATATATCTGCAACGTGAATCACAAGCCTTCCAATACAAAGGTCG |
| | | ACAAGAAGGTGGAGCCAAAGTCTTGTGATAAGACCCACACATGCCCAC |
| | | CTTGTCCGGCGCCAGAGGCCGCCGGAGGACCAAGCGTGTTCCTGTTTCC |
| | | ACCCAAGCCCAAGGACACCCTGATGATCTCCCGGACCCCAGAGGTGAC |
| | | ATGCGTGGTGGTGAGCGTGTCCCACGAGGACCCCGAGGTGAAGTTTAA |
| | | CTGGTACGTGGATGGCGTGGAGGTGCACAATGCCAAGACAAAGCCCCG |
| | | GGAGGAGCAGTACAATTCTACCTATAGAGTGGTGAGCGTGCTGACAGT |
| | | GCTGCACCAGGATTGGCTGAACGGCAAGGAGTATAAGTGTAAGGTGAG |
| | | CAATAAGGCCCTGCCAGCCCCCATCGAGAAGACCATCTCCAAGGCCAA |
| | | GGGCCAGCCTCGCGAACCACAGGTGTACACTCTGCCTCCATCTCGGGAC |
| | | GAGCTGACTAAGAACCAGGTCAGTCTGACCTGTCTGGTGAAAGGATTCT |
| | | ATCCCAGCGATATCGCTGTGGAGTGGGAATCCAATGGCCAGCCTGAGA |
| | | ACAATTACAAGACCACACCCCCTGTGCTGGACTCTGATGGCAGTTTCTT |
| | | TCTGTATAGTAAGCTGACCGTCGATAAATCACGATGGCAGCAGGGGAA |
| | | CGTGTTCAGCTGTTCAGTGATGCACGAAGCCCTGCACAACCATTACACC |
| | | CAGAAGAGCCTGAGCCTGTCTCCCGGC |
| 90 | 14386 | QVQLKESGPGLVAPSQSLSITCTVSGFSLTTYAISWVRQPPGKGLEWLGIIW |
| | | PGGGTNYNSALKSRLSISKDNSRSQVFLKMNSLQTDDTARYYCARGAGTW |
| | | YFDVWGAGTTVTVSSASTKGPSVFPLAPSSKSTSGGTAALGCLVKDYFPEP |
| | | VTVSWNSGALTSGVHTFPAVLQSSGLYSLSSVVTVPSSSLGTQTYICNVNH |
| | | KPSNTKVDKKVEPKSCDKTHTCPPCPAPEAAGGPSVFLFPPKPKDTLMISRT |
| | | PEVTCVVVSVSHEDPEVKFNWYVDGVEVHNAKTKPREEQYNSTYRVVSV |
| | | LTVLHQDWLNGKEYKCKVSNKALPAPIEKTISKAKGQPREPQVYTLPPSRD |
| | | ELTKNQVSLTCLVKGFYPSDIAVEWESNGQPENNYKTTPPVLDSDGSFFLY |
| | | SKLTVDKSRWQQGNVFSCSVMHEALHNHYTQKSLSLSPG |
| 91 | 14386 | CAGGTGCAGCTGAAGGAGTCCGGACCAGGACTGGTGGCCCCCTCTCAG |
| | | AGCCTGTCCATCACCTGCACAGTGAGCGGCTTTTCCCTGACCACATACG |
| | | CAATCTCTTGGGTGCGGCAGCCACCTGGCAAGGGACTGGAGTGGCTGG |
| | | GAATCATCTGGCCAGGAGGAGGCACAAACTATAATTCTGCCCTGAAGA |
| | | GCAGGCTGTCTATCAGCAAGGACAACTCCCGCTCTCAGGTGTTCCTGAA |
| | | GATGAACAGCCTGCAGACCGACGATACAGCAAGGTACTATTGTGCCCG |
| | | GGGGGCAGGGACCTGGTACTTTGACGTGTGGGGGGCAGGGACCACAGT |
| | | GACAGTGAGCTCCGCTAGCACAAAGGGCCCCTCCGTGTTTCCTCTGGCC |
| | | CCATCCTCTAAGTCCACCTCTGGAGGAACAGCCGCCCTGGGCTGTCTGG |
| | | TGAAGGATTACTTCCCTGAGCCAGTGACCGTGTCCTGGAACTCTGGGGC |
| | | CCTGACCAGCGGAGTGCACACATTTCCCGCCGTGCTGCAGAGCTCCGGA |
| | | CTGTACTCCCTGTCTAGCGTGGTGACCGTGCCTTCCTCTAGCCTGGGCAC |
| | | CCAGACATATATCTGCAACGTGAATCACAAGCCTTCCAATACAAAGGTC |
| | | GACAAGAAGGTGGAGCCAAAGTCTTGTGATAAGACCCACACATGCCCA |
| | | CCTTGTCCGGCGCCAGAGGCCGCCGGAGGACCAAGCGTGTTCCTGTTTC |
| | | CACCCAAGCCCAAGGACACCCTGATGATCTCCCGGACCCCAGAGGTGA |
| | | CATGCGTGGTGGTGAGCGTGTCCCACGAGGACCCCGAGGTGAAGTTTA |
| | | ACTGGTACGTGGATGGCGTGGAGGTGCACAATGCCAAGACAAAGCCCC |
| | | GGGAGGAGCAGTACAATTCTACCTATAGAGTGGTGAGCGTGCTGACAG |
| | | TGCTGCACCAGGATTGGCTGAACGGCAAGGAGTATAAGTGTAAGGTGA |
| | | GCAATAAGGCCCTGCCAGCCCCCATCGAGAAGACCATCTCCAAGGCCA |
| | | AGGGCCAGCCTCGCGAACCACAGGTGTACACTCTGCCTCCATCTCGGGA |
| | | CGAGCTGACTAAGAACCAGGTCAGTCTGACCTGTCTGGTGAAAGGATTC |
| | | TATCCCAGCGATATCGCTGTGGAGTGGGAATCCAATGGCCAGCCTGAGA |
| | | ACAATTACAAGACCACACCCCCTGTGCTGGACTCTGATGGCAGTTTCTT |
| | | TCTGTATAGTAAGCTGACCGTCGATAAATCACGATGGCAGCAGGGGAA |
| | | CGTGTTCAGCTGTTCAGTGATGCACGAAGCCCTGCACAACCATTACACC |
| | | CAGAAGAGCCTGAGCCTGTCTCCCGGC |
| 92 | 14387 | EVQLVESGGGLVKPGGSRKLSCAASGFTFSEFGMHWVRQAPDKGLKWVA |
| | | YISSGGSTIYYADTVKGRFTISRDNAKNTLFLQMTSLRSEDTAMYYCARDW |
| | | VDYWGQGTTLTVSSASTKGPSVFPLAPSSKSTSGGTAALGCLVKDYFPEPV |
| | | TVSWNSGALTSGVHTFPAVLQSSGLYSLSSVVTVPSSSLGTQTYICNVNHKP |
| | | SNTKVDKKVEPKSCDKTHTCPPCPAPEAAGGPSVFLFPPKPKDTLMISRTPE |
| | | VTCVVVSVSHEDPEVKFNWYVDGVEVHNAKTKPREEQYNSTYRVVSVLT |
| | | VLHQDWLNGKEYKCKVSNKALPAPIEKTISKAKGQPREPQVYTLPPSRDEL |
| | | TKNQVSLTCLVKGFYPSDIAVEWESNGQPENNYKTTPPVLDSDGSFFLYSK |
| | | LTVDKSRWQQGNVFSCSVMHEALHNHYTQKSLSLSPG |
| 93 | 14387 | GAGGTGCAGCTGTGGAGTCTGGAGGAGGACTGGTGAAGCCAGGAGGC |
| | | AGCAGAAAGCTGTCCTGCGCAGCCTCTGGCTTCACCTTTAGCGAGTTTG |
| | | GCATGCACTGGGTGAGACAGGCCCCCGACAAGGGCCTGAAGTGGGTGG |
| | | CCTACATCAGCTCCGGCGGCAGCACCATCTACTATGCCGACACAGTGAA |
| | | GGGCCGGTTCACCATCTCCAGAGATAACGCCAAGAATACACTGTTTCTG |
| | | CAGATGACCTCCCTGAGGTCTGAGGATACAGCCATGTACTATTGTGCCC |
| | | GCGACTGGGTGGATTATTGGGGCCAGGGCACCACACTGACCGTGTCTAG |
| | | CGCTAGCACAAAGGGCCCCTCCGTGTTTCCTCTGGCCCCATCCTCTAAG |
| | | TCCACCTCTGGAGGAACAGCCGCCCTGGGCTGTCTGGTGAAGGATTACT |
| | | TCCCTGAGCCAGTGACCGTGTCCTGGAACTCTGGGGCCCTGACCAGCGG |
| | | AGTGCACACATTTCCCGCCGTGCTGCAGAGCTCCGGACTGTACTCCCTG |
| | | TCTAGCGTGGTGACCGTGCCTTCCTCTAGCCTGGGCACCCAGACATATA |
| | | TCTGCAACGTGAATCACAAGCCTTCCAATACAAAGGTCGACAAGAAGG |
| | | TGGAGCCAAAGTCTTGTGATAAGACCCACACATGCCCACCTTGTCCGGC |
| | | GCCAGAGGCCGCCGGAGGACCAAGCGTGTTCCTGTTTCCACCCAAGCCC |
| | | AAGGACACCCTGATGATCTCCCGGACCCCAGAGGTGACATGCGTGGTG |
| | | GTGAGCGTGTCCCACGAGGACCCCGAGGTGAAGTTTAACTGGTACGTG |
| | | GATGGCGTGGAGGTGCACAATGCCAAGACAAAGCCCCGGGAGGAGCAG |
| | | TACAATTCTACCTATAGAGTGGTGAGCGTGCTGACAGTGCTGCACCAGG |
| | | ATTGGCTGAACGGCAAGGAGTATAAGTGTAAGGTGAGCAATAAGGCCC |
| | | TGCCAGCCCCCATCGAGAAGACCATCTCCAAGGCCAAGGGCCAGCCTC |
| | | GCGAACCACAGGTGTACACTCTGCCTCCATCTCGGGACGAGCTGACTAA |
| | | GAACCAGGTCAGTCTGACCTGTCTGGTGAAAGGATTCTATCCCAGCGAT |
| | | ATCGCTGTGGAGTGGGAATCCAATGGCCAGCCTGAGAACAATTACAAG |
| | | ACCACACCCCCTGTGCTGGACTCTGATGGCAGTTTCTTTCTGTATAGTAA |
| | | GCTGACCGTCGATAAATCACGATGGCAGCAGGGGAACGTGTTCAGCTG |
| | | TTCAGTGATGCACGAAGCCCTGCACAACCATTACACCCAGAAGAGCCTG |
| | | AGCCTGTCTCCCGGC |
| 94 | 14388 | EVQLQQSGPELVKPGASVKMSCKASGYTFTSYVMHWVKQKPGQGLEWIG |
| | | YINPYNDGTKYNEKFKGKATLTSDKSSSTAYMELSSLTSEDSAVYYCARLG |
| | | SRGTWFAYWGQGTLVTVSAASTKGPSVFPLAPSSKSTSGGTAALGCLVKD |
| | | YFPEPVTVSWNSGALTSGVHTFPAVLQSSGLYSLSVVTVPSSSLGTQTYIC |
| | | NVNHKPSNTKVDKKVEPKSCDKTHTCPPCPAPEAAGGPSVFLFPPKPKDTL |
| | | MISRTPEVTCVVVSVSHEDPEVKFNWYVDGVEVHNAKTKPREEQYNSTYR |
| | | VVSVLTVLHQDWLNGKEYKCKVSNKALPAPIEKTISKAKGQPREPQVYTLP |
| | | PSRDELTKNQVSLTCLVKGFYPSDIAVEWESNGQPENNYKTTPPVLDSDGS |
| | | FFLYSKLTVDKSRWQQGNVFSCSVMHEALHNHYTQKSLSLSPG |
| 95 | 14388 | GAGGTGCAGCTGCAGCAGAGCGGACCAGAGCTGGTGAAGCCTGGGGCC |
| | | AGCGTGAAGATGTCTTGCAAGGCCAGCGGCTACACCTTCACATCCTATG |
| | | TGATGCACTGGGTGAAGCAGAAGCCAGGCCAGGGCCTGGAGTGGATCG |
| | | GCTACATCAACCCCTATAATGACGGCACCAAGTACAACGAGAAGTTTA |
| | | AGGGCAAGGCCACCCTGACATCTGATAAGAGCTCCTCTACCGCCTATAT |
| | | GGAGCTGAGCTCCCTGACATCTGAGGACAGCGCCGTGTACTATTGTGCC |
| | | CGGCTGGGCTCCAGAGGCACATGGTTTGCCTACTGGGGCCAGGGCACCC |
| | | TGGTGACAGTGTCTGCCGCTAGCACAAAGGGCCCCTCCGTGTTTCCTCT |
| | | GGCCCCATCCTCTAAGTCCACCTCTGGAGGAACAGCCGCCCTGGGCTGT |
| | | CTGGTGAAGGATTACTTCCCTGAGCCAGTGACCGTGTCCTGGAACTCTG |
| | | GGGCCCTGACCAGCGGAGTGCACACATTTCCCGCCGTGCTGCAGAGCTC |
| | | CGGACTGTACTCCCTGTCTAGCGTGGTGACCGTGCCTTCCTCTAGCCTGG |
| | | GCACCCAGACATATATCTGCAACGTGAATCACAAGCCTTCCAATACAAA |
| | | GGTCGACAAGAAGGTGGAGCCAAAGTCTTGTGATAAGACCCACACATG |
| | | CCCACCTTGTCCGGCGCCAGAGGCCGCCGGAGGACCAAGCGTGTTCCTG |
| | | TTTCCACCCAAGCCCAAGGACACCCTGATGATCTCCCGGACCCCAGAGG |
| | | TGACATGCGTGGTGGTGAGCGTGTCCCACGAGGACCCCGAGGTGAAGT |
| | | TTAACTGGTACGTGGATGGCGTGGAGGTGCACAATGCCAAGACAAAGC |
| | | CCCGGGAGGAGCAGTACAATTCTACCTATAGAGTGGTGAGCGTGCTGA |
| | | CAGTGCTGCACCAGGATTGGCTGAACGGCAAGGAGTATAAGTGTAAGG |
| | | TGAGCAATAAGGCCCTGCCAGCCCCCATCGAGAAGACCATCTCCAAGG |
| | | CCAAGGGCCAGCCTCGCGAACCACAGGTGTACACTCTGCCTCCATCTCG |
| | | GGACGAGCTGACTAAGAACCAGGTCAGTCTGACCTGTCTGGTGAAAGG |
| | | ATTCTATCCCAGCGATATCGCTGTGGAGTGGGAATCCAATGGCCAGCCT |
| | | GAGAACAATTACAAGACCACACCCCCTGTGCTGGACTCTGATGGCAGTT |
| | | TCTTTCTGTATAGTAAGCTGACCGTCGATAAATCACGATGGCAGCAGGG |
| | | GAACGTGTTCAGCTGTTCAGTGATGCACGAAGCCCTGCACAACCATTAC |
| | | ACCCAGAAGAGCCTGAGCCTGTCTCCCGGC |
| 96 | 14389 | QVQLKQSGPGLVQPSQSLSITCTVSGFSLTSYGVHWVRQSPGKGLEWLGVI |
| | | WSGGSTDYNAAFISRLSISKDNSKSQVFFKMNSLQADDTAIYYCARNPLTA |
| | | TVMDYWGQGTSVTVSSASTKGPSVFPLAPSSKSTSGGTAALGCLVKDYFPE |
| | | PVTVSWNSGALTSGVHTFPAVLQSSGLYSLSSVVTVPSSSLGTQTYICNVNH |
| | | KPSNTKVDKKVEPKSCDKTHTCPPCPAPEAAGGPSVFLFPPKPKDTLMISRT |
| | | PEVTCVVVSVSHEDPEVKFNWYVDGVEVHNAKTKPREEQYNSTYRVVSV |
| | | LTVLHQDWLNGKEYKCKVSNKALPAPIEKTISKAKGQPREPQVYTLPPSRD |
| | | ELTKNQVSLTCLVKGFYPSDIAVEWESNGQPENNYKTTPPVLDSDGSFFLY |
| | | SKLTVDKSRWQQGNVFSCSVMHEALHNHYTQKSLSLSPG |
| 97 | 14389 | CAGGTGCAGCTGAAGCAGTCCGGACCAGGACTGGTGCAGCCTTCTCAG |
| | | AGCCTGTCCATCACCTGCACAGTGAGCGGCTTCTCCCTGACCTCTTACG |
| | | GCGTGCACTGGGTGAGGCAGTCTCCTGGCAAGGGACTGGAGTGGCTGG |
| | | GCGTGATCTGGAGCGGAGGCTCCACAGACTATAACGCCGCCTTTATCTC |
| | | TCGCCTGTCTATCAGCAAGGATAACTCCAAGTCTCAGGTGTTCTTTAAG |
| | | ATGAATAGCCTGCAGGCCGACGATACAGCCATCTACTATTGTGCCCGGA |
| | | ATCCCCTGACCGCCACAGTGATGGACTACTGGGGCCAGGGCACCAGCG |
| | | TGACAGTGAGCTCCGCTAGCACAAAGGGCCCCTCCGTGTTTCCTCTGGC |
| | | CCCATCCTCTAAGTCCACCTCTGGAGGAACAGCCGCCCTGGGCTGTCTG |
| | | GTGAAGGATTACTTCCCTGAGCCAGTGACCGTGTCCTGGAACTCTGGGG |
| | | CCCTGACCAGCGGAGTGCACACATTTCCCGCCGTGCTGCAGAGCTCCGG |
| | | ACTGTACTCCCTGTCTAGCGTGGTGACCGTGCCTTCCTCTAGCCTGGGCA |
| | | CCCAGACATATATCTGCAACGTGAATCACAAGCCTTCCAATACAAAGGT |
| | | CGACAAGAAGGTGGAGCCAAAGTCTTGTGATAAGACCCACACATGCCC |
| | | ACCTTGTCCGGCGCCAGAGGCCGCCGGAGGACCAAGCGTGTTCCTGTTT |
| | | CCACCCAAGCCCAAGGACACCCTGATGATCTCCCGGACCCCAGAGGTG |
| | | ACATGCGTGGTGGTGAGCGTGTCCCACGAGGACCCCGAGGTGAAGTTT |
| | | AACTGGTACGTGGATGGCGTGGAGGTGCACAATGCCAAGACAAAGCCC |
| | | CGGGAGGAGCAGTACAATTCTACCTATAGAGTGGTGAGCGTGCTGACA |
| | | GTGCTGCACCAGGATTGGCTGAACGGCAAGGAGTATAAGTGTAAGGTG |
| | | AGCAATAAGGCCCTGCCAGCCCCCATCGAGAAGACCATCTCCAAGGCC |
| | | AAGGGCCAGCCTCGCGAACCACAGGTGTACACTCTGCCTCCATCTCGGG |
| | | ACGAGCTGACTAAGAACCAGGTCAGTCTGACCTGTCTGGTGAAAGGATT |
| | | CTATCCCAGCGATATCGCTGTGGAGTGGGAATCCAATGGCCAGCCTGAG |
| | | AACAATTACAAGACCACACCCCCTGTGCTGGACTCTGATGGCAGTTTCT |
| | | TTCTGTATAGTAAGCTGACCGTCGATAAATCACGATGGCAGCAGGGGA |
| | | ACGTGTTCAGCTGTTCAGTGATGCACGAAGCCCTGCACAACCATTACAC |
| | | CCAGAAGAGCCTGAGCCTGTCTCCCGGC |
| 98 | 14390 | QVQLQQPGAELVRPGASVKLSCKASGYPFTSYWMSWVKQRPEQGLEWIG |
| | | RIDPYDSETHYNQKFKDKAILTVDKSSSTAYMQLSSLTSEDSAVYYCARTY |
| | | YGNYDAMDYWGQGTSVTVSSASTKGPSVFPLAPSSKSTSGGTAALGCLVK |
| | | DYFPEPVTVSWNSGALTSGVHTFPAVLQSSGLYSLSSVVTVPSSSLGTQTYI |
| | | CNVNHKPSNTKVDKKVEPKSCDKTHTCPPCPAPEAAGGPSVFLFPPKPKDT |
| | | LMISRTPEVTCVVVSVSHEDPEVKFNWYVDGVEVHNAKTKPREEQYNSTY |
| | | RVVSVLTVLHQDWLNGKEYKCKVSNKALPAPIEKTISKAKGQPREPQVYT |
| | | LPPSRDELTKNQVSLTCLVKGFYPSDIAVEWESNGQPENNYKTTPPVLDSD |
| | | GSFFLYSKLTVDKSRWQQGNVFSCSVMHEALHNHYTQKSLSLSPG |
| 99 | 14390 | CAGGTGCAGCTGCAGCAGCCAGGAGCCGAGCTGGTGCGCCCTGGGGCC |
| | | AGCGTGAAGCTGTCCTGCAAGGCCTCTGGCTACCCCTTCACCAGCTATT |
| | | GGATGTCCTGGGTGAAGCAGCGGCCAGAGCAGGGACTGGAGTGGATCG |
| | | GCAGAATCGACCCCTACGATTCTGAGACACACTATAACCAGAAGTTTAA |
| | | GGACAAGGCCATCCTGACCGTGGATAAGAGCTCCTCTACAGCCTACATG |
| | | CAGCTGAGCTCCCTGACCTCCGAGGACTCTGCCCGTACTATTGTGCCA |
| | | GGACATACTATGGCAATTACGACGCCATGGATTATTGGGGCCAGGGCA |
| | | CCTCCGTGACAGTGTCTAGCGCTAGCACAAAGGGCCCCTCCGTTTCC |
| | | TCTGGCCCCATCCTCTAAGTCCACCTCTGGAGGAACAGCCGCCCTGGGC |
| | | TGTCTGGTGAAGGATTACTTCCCTGAGCCAGTGACCGTGTCCTGGAACT |
| | | CTGGGGCCCTGACCAGCGGAGTGCACACATTTCCCGCCGTGCTGCAGAG |
| | | CTCCGGACTGTACTCCCTGTCTAGCGTGGTGACCGTGCCTTCCTCTAGCC |
| | | TGGGCACCCAGACATATATCTGCAACGTGAATCACAAGCCTTCCAATAC |
| | | AAAGGTCGACAAGAAGGTGGAGCCAAAGTCTTGTGATAAGACCCACAC |
| | | ATGCCCACCTTGTCCGGCGCCAGAGGCCGCCGGAGGACCAAGCGTGTTC |
| | | CTGTTTCCACCCAAGCCCAAGGACACCCTGATGATCTCCCGGACCCCAG |
| | | AGGTGACATGCGTGGTGGTGAGCGTGTCCCACGAGGACCCCGAGGTGA |
| | | AGTTTAACTGGTACGTGGATGGCGTGGAGGTGCACAATGCCAAGACAA |
| | | AGCCCCGGGAGGAGCAGTACAATTCTACCTATAGAGTGGTGAGCGTGC |
| | | TGACAGTGCTGCACCAGGATTGGCTGAACGGCAAGGAGTATAAGTGTA |
| | | AGGTGAGCAATAAGGCCCTGCCAGCCCCCATCGAGAAGACCATCTCCA |
| | | AGGCCAAGGGCCAGCCTCGCGAACCACAGGTGTACACTCTGCCTCCATC |
| | | TCGGGACGAGCTGACTAAGAACCAGGTCAGTCTGACCTGTCTGGTGAA |
| | | AGGATTCTATCCCAGCGATATCGCTGTGGAGTGGGAATCCAATGGCCAG |
| | | CCTGAGAACAATTACAAGACCACACCCCCTGTGCTGGACTCTGATGGCA |
| | | GTTTCTTTCTGTATAGTAAGCTGACCGTCGATAAATCACGATGGCAGCA |
| | | GGGGAACGTGTTCAGCTGTTCAGTGATGCACGAAGCCCTGCACAACCAT |
| | | TACACCCAGAAGAGCCTGAGCCTGTCTCCCGGC |
| 100 | 14391 | QVQLQQPGAELVRPGASVKLSCKASGYTFTSYWINWVKQRPGQGLEWIGN |
| | | IYPSDNYTNYNQKFKDKATLTVDKSSSTAYMQLSSPTSEDSAVYYCTRGG |
| | | GIYYENYFDYWGQGTTLTVSSASTKGPSVFPLAPSSKSTSGGTAALGCLVK |
| | | DYFPEPVTVSWNSGALTSGVHTFPAVLQSSGLYSLSSVVTVPSSSLGTQTYI |
| | | CNVNKPSNTKVDKKVEPKSCDKTHTCPPCPAPEAAGGPSVFLFPPKPKDT |
| | | LMISRTPEVTCVVVSVSHEDPEVKFNWYVDGVEVHNAKTKPREEQYNSTY |
| | | RVVSVLTVLHQDWLNGKEYKCKVSNKALPAPIEKTISKAKGQPREPQVYT |
| | | LPPSRDELTKNQVSLTCLVKGFYRSDIAVEWESNGQPENNYKTTPPVLDSD |
| | | GSFFLYSKLTVDKSRWQQGNVFSCSVMHEALHNHYTQKSLSLSPG |
| 101 | 14391 | CAGGTGCAGCTGCAGCAGCCAGGAGCCGAGCTGGTGAGACCTGGGGCC |
| | | AGCGTGAAGCTGTCCTGCAAGGCCTCTGGCTACACCTTCACAAGCTATT |
| | | GGATCAACTGGGTGAAGCAGAGGCCAGGACAGGGACTGGAGTGGATCG |
| | | GCAACATCTACCCCTCCGACAACTACACAAACTACAACCAGAAGTTTAA |
| | | GGACAAGGCCACCCTGACAGTGGATAAGAGCTCCTCTACCGCCTATATG |
| | | CAGCTGAGCTCCCCCACATCCGAGGACTCTGCCGTGTACTATTGTACCC |
| | | GGGGCGGCGGCATCTACTACGAGAACTACTTCGATTACTGGGGCCAGG |
| | | GCACCACACTGACAGTGTCTAGCGCTAGCACAAAGGGCCCCTCCGTGTT |
| | | TCCTCTGGCCCCATCCTCTAAGTCCACCTCTGGAGGAACAGCCGCCCTG |
| | | GGCTGTCTGGTGAAGGATTACTTCCCTGAGCCAGTGACCGTGTCCTGGA |
| | | ACTCTGGGGCCCTGACCAGCGGAGTGCACACATTTCCCGCCGTGCTGCA |
| | | GAGCTCCGGACTGTACTCCCTGTCTAGCGTGGTGACCGTGCCTTCCTCTA |
| | | GCCTGGGCACCCAGACATATATCTGCAACGTGAATCACAAGCCTTCCAA |
| | | TACAAAGGTCGACAAGAAGGTGGAGCCAAAGTCTTGTGATAAGACCCA |
| | | CACATGCCCACCTTGTCCGGCGCCAGAGGCCGCCGGAGGACCAAGCGT |
| | | GTTCCTGTTTCCACCCAAGCCCAAGGACACCCTGATGATCTCCCGGACC |
| | | CCAGAGGTGACATGCGTGGTGGTGAGCGTGTCCCACGAGGACCCCGAG |
| | | GTGAAGTTTAACTGGTACGTGGATGGCGTGGAGGTGCACAATGCCAAG |
| | | ACAAAGCCCCGGGAGGAGCAGTACAATTCTACCTATAGAGTGGTGAGC |
| | | GTGCTGACAGTGCTGCACCAGGATTGGCTGAACGGCAAGGAGTATAAG |
| | | TGTAAGGTGAGCAATAAGGCCCTGCCAGCCCCCATCGAGAAGACCATC |
| | | TCCAAGGCCAAGGGCCAGCCTCGCGAACCACAGGTGTACACTCTGCCTC |
| | | CATCTCGGGACGAGCTGACTAAGAACCAGGTCAGTCTGACCTGTCTGGT |
| | | GAAAGGATTCTATCCCAGCGATATCGCTGTGGAGTGGGAATCCAATGGC |
| | | CAGCCTGAGAACAATTACAAGACCACACCCCCTGTGCTGGACTCTGATG |
| | | GCAGTTTCTTTCTGTATAGTAAGCTGACCGTCGATAAATCACGATGGCA |
| | | GCAGGGGAACGTGTTCAGCTGTTCAGTGATGCACGAAGCCCTGCACAA |
| | | CCATTACACCCAGAAGAGCCTGAGCCTGTCTCCCGGC |
| 102 | 14392 | QVHLQQSGSELRIPGSSVKLSCKDFDSEVFPIAYMSWVRQKPGHGFEWIGDI |
| | | LPSIGRTIYGEKFEDKATLDADTVSNTAYLDLNSLTSEDSAIYYCSRGDYYY |
| | | GSREYAMDYWGQGTSVTVSSASTKGPSVFPLAPSSKSTSGGTAALGCLVK |
| | | DYFPEPVTVSWNSGALTSGVHTFPAVLQSSGLYSLSSVVTVPSSSLGTQTYI |
| | | CNVNHKPSNTKVDKKVEPKSCDKTHTCPPCPAPEAAGGPSVFLFPPKPKDT |
| | | LMISRTPEVTCVVVSVSHEDPEVKFNWYNDGVEVHNAKTKPREEQYNSTY |
| | | RVVSVLTVLHQDWLNGKEYKCKVSNKALPAPIEKTISKAKGQPREPQVYT |
| | | LPPSRDELTKNQVSLTCLVKGFYPSDIAVEWESNGQPENNYKTTPPVLDSD |
| | | GSFFLYSKLTVDKSRWQQGNVFSCSVMHEALHNHYTQKSLSLSPG |
| 103 | 14392 | CAGGTGCACCTGCAGCAGTCCGGCTCTGAGCTGCGCATCCCTGGCAGCT |
| | | CCGTGAAGCTGAGCTGCAAGGACTTCGATTCCGAGGTGTTTCCCATCGC |
| | | CTATATGTCCTGGGTGCGGCAGAAGCCTGGACACGGATTCGAGTGGATC |
| | | GGCGACATCCTGCCCTCTATCGGCAGGACCATCTATGGCGAGAAGTTTG |
| | | AGGATAAGGCCACACTGGACGCCGATACCGTGTCCAACACAGCCTACC |
| | | TGGACCTGAATAGCCTGACATCCGAGGATTCTGCCATCTACTATTGTTCT |
| | | CGGGGCGACTACTATTACGGCAGCAGAGAGTATGCCATGGATTACTGG |
| | | GGCCAGGGCACCAGCGTGACAGTGTCTAGCGCTAGCACAAAGGGCCCC |
| | | TCCGTGTTTCCTCTGGCCCCATCCTCTAAGTCCACCTCTGGAGGAACAGC |
| | | CGCCCTGGGCTGTCTGGTGAAGGATTACTTCCCTGAGCCAGTGACCGTG |
| | | TCCTGGAACTCTGGGGCCCTGACCAGCGGAGTGCACACATTTCCCGCCG |
| | | TGCTGCAGAGCTCCGGACTGTACTCCCTGTCTAGCGTGGTGACCGTGCC |
| | | TTCCTCTAGCCTGGGCACCCAGACATATATCTGCAACGTGAATCACAAG |
| | | CCTTCCAATACAAAGGTCGACAAGAAGGTGGAGCCAAAGTCTTGTGAT |
| | | AAGACCCACACATGCCCACCTTGTCCGGCGCCAGAGGCCGCCGGAGGA |
| | | CCAAGCGTGTTCCTGTTTCCACCCAAGCCCAAGGACACCCTGATGATCT |
| | | CCCGGACCCCAGAGGTGACATGCGTGGTGGTGAGCGTGTCCCACGAGG |
| | | ACCCCGAGGTGAAGTTTAACTGGTACGTGCATGGCGTGGAGGTGCACA |
| | | ATGCCAAGACAAAGCCCCGGGAGGAGCAGTACAATTCTACCTATAGAG |
| | | TGGTGAGCGTGCTGACAGTGCTGCACCAGGATTGGCTGAACGGCAAGG |
| | | AGTATAAGTGTAAGGTGAGCAATAAGGCCCTGCCAGCCCCCATCGAGA |
| | | AGACCATCTCCAAGGCCAAGGGCCAGCCTCGCGAACCACAGGTGTACA |
| | | CTCTGCCTCCATCTCGGGACGAGCTGACTAAGAACCAGGTCAGTCTGAC |
| | | CTGTCTGGTGAAAGGATTCTATCCCAGCGATATCGCTGTGGAGTGGGAA |
| | | TCCAATGGCCAGCCTGAGAACAATTACAAGACCACACCCCCTGTGCTGG |
| | | ACTCTGATGGCAGTTTCTTTCTGTATAGTAAGCTGACCGTCGATAAATC |
| | | ACGATGGCAGCAGGGGAACGTGTTCAGCTGTTCAGTGATGCACGAAGC |
| | | CCTGCACAACCATTACACCCAGAAGAGCCTGAGCCTGTCTCCCGGC |
| 104 | 14393 | QVQLQESGGGLVKPGGSRKLSCAASGFTFSEFGMHWVRQAPDKGLEWVA |
| | | YISSGSSTIYYADTVKGRFTISRDNAKNTLFLQMTSLRSEDTAMYYCARDW |
| | | VDYWGQGTALTVSSASTKGPSVFPLAPSSKSTSGGTAALGCLVKDYFPEPV |
| | | TVSWNSGALTSGVHTFPAVLQSSGLYSLSSVVTVPSSSLGTQTYICNVNHKP |
| | | SNTKVDKKVEPKSCDKTHTCPPCPAPEAAGGPSVFLFPPKPKDTLMISRTPE |
| | | VTCVVVSVSHEDPEVKFNWYVDGVEVEVHNAKTKPREEQYNSTYRVVSVLT |
| | | VLHQDWLNGKEYKCKVSNKALPAPIEKTISKAKGQPREPQVYTLPPSRDEL |
| | | TKNQVSLTCLVKGFYPSDIAVEWESNGQPENNYKTTPPVLDSDGSFFLYSK |
| | | LTVDKSRWQQGNVFSCSVMHEALHNHYTQKSLSLSPG |
| 105 | 14393 | CAGGTGCAGCTGCAGGAGTCTGGAGGAGGACTGGTGAAGCCAGGAGGC |
| | | TCTAGAAAGCTGAGCTGCGCCGCCTCCGGCTTCACCTTTAGCGAGTTTG |
| | | GCATGCACTGGGTGAGACAGGCCCCCGACAAGGGACTGGAGTGGGTGG |
| | | CCTACATCAGCTCCGGCTCTAGCACCATCTACTATGCCGACACAGTGAA |
| | | GGGCCGGTTCACCATCTCCAGAGATAACGCCAAGAATACACTGTTTCTG |
| | | CAGATGACCAGCCTGAGGTCCGAGGATACAGCCATGTACTATTGTGCCC |
| | | GCGACTGGGTGGATTATTGGGGACAGGGAACCGCCCTGACAGTGTCCTC |
| | | TGCTAGCACAAAGGGCCCCTCCGTGTTTCCTCTGGCCCCATCCTCTAAGT |
| | | CCACCTCTGGAGGAACAGCCGCCCTGGGCTGTCTGGTGAAGGATTACTT |
| | | CCCTGAGCCAGTGACCGTGTCCTGGAACTCTGGGGCCCTGACCAGCGGA |
| | | GTGCACACATTTCCCGCCGTGCTGCAGAGCTCCGGACTGTACTCCCTGT |
| | | CTAGCGTGGTGACCGTGCCTTCCTCTAGCCTGGGCACCCAGACATATAT |
| | | CTGCAACGTGAATCACAAGCCTTCCAATACAAAGGTCGACAAGAAGGT |
| | | GGAGCCAAAGTCTTGTGATAAGACCCACACATGCCCACCTTGTCCGGCG |
| | | CCAGAGGCCGCCGGAGGACCAAGCGTGTTCCTGTTTCCACCCAAGCCCA |
| | | AGGACACCCTGATGATCTCCCGGACCCCAGAGGTGACATGCGTGGTGGT |
| | | GAGCGTGTCCCACGAGGACCCCGAGGTGAAGTTTAACTGGTACGTGGA |
| | | TGGCGTGGAGGTGCACAATGCCAAGACAAAGCCCCGGGAGGAGCAGTA |
| | | CAATTCTACCTATAGAGTGGTGAGCGTGCTGACAGTGCTGCACCAGGAT |
| | | TGGCTGAACGGCAAGGAGTATAAGTGTAAGGTGAGCAATAAGGCCCTG |
| | | CCAGCCCCCATCGAGAAGACCATCTCCAAGGCCAAGGGCCAGCCTCGC |
| | | GAACCACAGGTGTACACTCTGCCTCCATCTCGGGACGAGCTGACTAAGA |
| | | ACCAGGTCAGTCTGACCTGTCTGGTGAAAGGATTCTATCCCAGCGATAT |
| | | CGCTGTGGAGTGGGAATCCAATGGCCAGCCTGAGAACANTTACAAGAC |
| | | CACACCCCCTGTGCTGGACTCTGATGGCAGTTTCTTTCTGTATAGTAAGC |
| | | TGACCGTCGATAAATCACGATGGCAGCAGGGGAACGTGTTCAGCTGTTC |
| | | AGTGATGCACGAAGCCCTGCACAACCATTACACCCAGAAGAGCCTGAG |
| | | CCTGTCTCCCGGC |
| 106 | 14394 | QVQLKQSGPGLVQPSQSLSITCTVSGFSLTSYGVHWVRQSPGKGLEWLGVI |
| | | WSGGSTDYNGAFISRLSISKDNSKSQVFFKMNSLQADDTAMYFCARDRGG |
| | | GFDYWGQGTTLTVSSASTKGPSVFPLAPSSKSTSGGTAALGCLVKDYFPEP |
| | | VTVSWNSGALTSGVHTFPAVLQSSGLYSLSSVVTVPSSSLGTQTYICNVNH |
| | | KPSNTKVDKKVEPKSCDKTHTCPPCPAPEAAGGPSVFLFPPKPKDTLMISRT |
| | | PEVTCVVVSVSHEDPEVKFNWYVDGVEVHNAKTKPREEQYNSTYRVVSV |
| | | LTVLHQDWLNGKEYKCKVSNKALPAPIEKTISKAKGQPREPQVYTLPPSRD |
| | | ELTKNQVSLTCLVKGFYPSDIAVEWESNGQPENNYKTTPPVLDSDGSFFLY |
| | | SKLTVDKSRWQQGNVFSCSVMHEALHNHYTQKSLSLSPG |
| 107 | 14394 | CAGGTGCAGCTGAAGCAGTCCGGCCCCGGCCTGGTGCAGCCTTCTCAGA |
| | | GCCTGTCCATCACCTGCACAGTGAGCGGCTTCTCCCTGACCTCTTACGG |
| | | AGTGCACTGGGTGCGGCAGTCTCCAGGCAAGGGACTGGAGTGGCTGGG |
| | | CGTGATCTGGAGCGGAGGCTCCACAGACTATAACGGGGCCTTCATCTCT |
| | | AGGCTGTCTATCAGCAAGGATAACTCCAAGTCTCAGGTGTTCTTTAAGA |
| | | TGAATAGCCTGCAGGCCGACGATACCGCCATGTACTTCTGTGCCCGGGA |
| | | CAGAGGCGGCGGCTTTGATTATTGGGGCCAGGGCACCACACTGACAGT |
| | | GAGCTCCGCTAGCACAAAGGGCCCCTCCGTGTTTCCTCTGGCCCCATCC |
| | | TCTAAGTCCACCTCTGGAGGAACAGCCGCCCTGGGCTGTCTGGTGAAGG |
| | | ATTACTTCCCTGAGCCAGTGACCGTGTCCTGGAACTCTGGGGCCCTGAC |
| | | CAGCGGAGGCACACATTTCCCGCCGTGCTGCAGAGCTCCGGACTGTAC |
| | | TCCCTGTCTAGCGTGGTGACCGTGCCTTCCTCTAGCCTGGGCACCCAGA |
| | | CATATATCTGCAACGTGAATCACAAGCCTTCCAATACAAAGGTCGACAA |
| | | GAAGGTGGAGCCAAAGTCTTGTGATAAGACCCACACATGCCCACCTTGT |
| | | CCGGCGCCAGAGGCCGCCGGAGGACCAAGCGTGTTCCTGTTTCCACCCA |
| | | AGCCCAAGGACACCCTGATGATCTCCCGGACCCCAGAGGTGACATGCG |
| | | TGGTGGTGAGCGTGTCCCACGAGGACCCCGAGGTGAAGTTTAACTGGTA |
| | | CGTGGATGGCGTGGAGGTGCACAATGCCAAGACAAAGCCCCGGGAGGA |
| | | GCAGTACAATTCTACCTATAGAGTGGTGAGCGTGCTGACAGTGCTGCAC |
| | | CAGGATTGGCTGAACGGCAAGGAGTATAAGTGTAAGGTGAGCAATAAG |
| | | GCCCTGCCAGCCCCCATCGAGAAGACCATCTCCAAGGCCAAGGGCCAG |
| | | CCTCGCGAACCACAGGTGTACACTCTGCCTCCATCTCGGGACGAGCTGA |
| | | CTAAGAACCAGGTCAGTCTGACCTGTCTGGTGAAAGGATTCTATCCCAG |
| | | CGATATCGCTGTGGAGTGGGAATCCAATGGCCAGCCTGAGAACAATTA |
| | | CAAGACCACACCCCCTGTGCTGGACTCTGATGGCAGTTTCTTTCTGTATA |
| | | GTAAGCTGACCGTCGATAAATCACGATGGCAGCAGGGGAACGTGTTCA |
| | | GCTGTTCAGTGATGCACGAAGCCCTGCACAACCATTACACCCAGAAGA |
| | | GCCTGAGCCTGTCTCCCGGC |
| 108 | 4667 | EVQLVQSGAEVKKPGESLRISCKGSGYSFSTYWISWVRQMPGKGLEWMGK |
| | | IYPGDSYTNYSPSFQGQVTISADKSISTAYLQWSSLKASDTAMYYCARGYGI |
| | | FDYWGQGTLVTVSSASTKGPSVFPLAPCSRSTSESTAALGCLVKDYFPEPVT |
| | | VSWNSGALTSGVHTFPAVLQSSGLYSLSSVVTVPSSNFGTQTYTCNVDHKP |
| | | SNTKVDKTVEPKSCDKTHTCPPCPAPELLGGPSVFLFPPKPKDTLMISRTPE |
| | | VTCVVVDVSHEDPEVKFNWYVDGVEVHNAKTKPREEQYNSTYRVVSVLT |
| | | VLHQDWLNGKEYKCKVSNKALPAPIEKTISKAKGQPREPQVYVLPPSRDEL |
| | | TKNQVSLLCLVKGFYPSDIAVEWESNGQPENNYLTWPPVLDSDGSFFLYSK |
| | | LTVDKSRWQQGNVFSCSVMHEALHNHYTQKSLSLSPG |
| 109 | 4667 | GAAGTCCAGCTGGTCCAGTCCGGAGCCGAGGTGAAGAAACCCGGCGAA |
| | | TCACTGCGAATCAGCTGCAAGGGCAGCGGCTACAGCTTCTCCACTTATT |
| | | GGATTAGCTGGGTGCGGCAGATGCCTGGGAAGGGACTGGAGTGGATGG |
| | | GGAAAATCTACCCCGGAGATAGCTACACCAACTATTCTCCTAGTTTTCA |
| | | GGGCCAAGTGACTATCTCCGCCGACAAGTCAATTAGCACCGCTTATCTG |
| | | CAGTGGAGCTCCCTGAAAGCTAGCGATACAGCAATGTACTATTGTGCCA |
| | | GAGGCTACGGGATTTTCGACTATTGGGGACAGGGCACTCTGGTCACCGT |
| | | GTCTAGTGCTTCTACTAAGGGGCCCAGTGTGTTTCCACTGGCACCCTGCT |
| | | CCAGGTCTACAAGTGAATCAACTGCCGCTCTGGGATGTCTGGTGAAAGA |
| | | TTACTTCCCAGAGCCCGTCACAGTGAGCTGGAACTCCGGCGCACTGACT |
| | | TCTGGGGTCCACACCTTTCCTGCCGTGCTGCAGTCAAGCGGCCTGTACA |
| | | GCCTGTCCTCTGTGGTCACCGTGCCAAGTTCAAATTTCGGGACCCAGAC |
| | | ATATACTTGCAACGTGGACCACAAGCCTTCTAATACAAAGGTCGATAAA |
| | | ACTGTGGAACCAAAGAGTTGTGACAAAACCCATACATGCCCCCCTTGTC |
| | | CTGCACCAGAGCTGCTGGGAGGACCATCCGTGTTCCTGTTTCCACCCAA |
| | | GCCCAAAGATACACTGATGATCAGCCGCACCCCAGAAGTCACATGCGT |
| | | GGTCGTGGACGTGTCCCACGAGGACCCCGAAGTCAAGTTTAACTGGTAC |
| | | GTGGACGGCGTCGAGGTGCATAATGCTAAGACCAAACCACGGGAGGAA |
| | | CAGTACAATTCAACCTATAGAGTCGTGAGCGTCCTGACAGTGCTGCACC |
| | | AGGATTGGCTGAACGGCAAAGAGTATAAGTGCAAAGTGTCTAATAAGG |
| | | CACTGCCCGCCCCTATCGAGAAAACCATTAGCAAGGCCAAAGGGCAGC |
| | | CTAGGGAACCACAGGTCTACGTGCTGCCTCCAAGCCGCGATGAGCTGAC |
| | | AAAGAACCAGGTCTCCCTGCTGTGTCTGGTGAAAGGGTTCTATCCCAGT |
| | | GACATTGCTGTGGAGTGGGAATCAAATGGACAGCCTGAAAACAATTAC |
| | | CTGACATGGCCCCCTGTGCTGGACTCTGATGGAAGTTTCTTTCTGTATTC |
| | | CAAGCTGACTGTGGACAAATCTCGATGGCAGCAGGGCAACGTCTTTAGC |
| | | TGTTCCGTGATGCATGAGGCCCTGCACAATCATTACACCCAGAAGTCTC |
| | | TGAGTCTGTCACCTGGC |
| 110 | 14396 | QVQLKESGPGLVAPSQSLSITCTVSGFSLTSYAINWVRQPPGKGLEWLGVL |
| | | WPGGGTNYNSALKSRLSISKDNSKSQVFLKMNSLQTDDTARYYCARGSGT |
| | | WYFDVWGAGTTVTSSASTKGPSVFLPLAPSSKSTSGGTAALGCLVKDYFPE |
| | | PVTVSWNSGALTSGVHTFPAVLQSSGLYSLSSVVTVPSSSLGTQTYICNVNH |
| | | KPSNTKVDKKVEPKSCDKTHTCPPCPAPEAAGGPSVFLFPPKPKDTLMISRT |
| | | PEVTCVVVSVSHEDPEVKFNWYVDGVEVHNAKTKPREEQYNSTYRVVSV |
| | | LTVLHQDWLNGKEYKCKVSNKALPAPIEKTISKAKGQPREPQVYTLPPSRD |
| | | ELTKNQVSLTCLVKGFYPSDIAVEWESNGQPENNYKTTPPVLDSDGSFFLY |
| | | SKLTVDKSRWQQGNVFSCSVMHEALHNHYTQKSLSLSPG |
| 111 | 14396 | CAGGTGCAGCTGAAGGAGAGCGGACCAGGACTGGTGGCCCCCTCTCAG |
| | | AGCCTGTCCATCACCTGCACAGTGAGCGGCTTTTCCCTGACCTCTTACGC |
| | | CATCAACTGGGTGCGGCAGCCACCTGGCAAGGGACTGGAGTGGCTGGG |
| | | CGTGCTGTGGCCAGGAGGAGGCACAAACTATAATAGCGCCCTGAAGTC |
| | | CAGGCTGTCTATCAGCAAGGACAACTCCAAGTCTCAGGTGTTCCTGAAG |
| | | ATGAACAGCCTGCAGACCGACGATACAGCCCGGTACTATTGTGCCAGA |
| | | GGCTCCGGCACCTGGTACTTTGACGTGTGGGGGGCAGGGACCACAGTG |
| | | ACAGTGAGCTCCGCTAGCACAAAGGGCCCCTCCGTGTTTCCTCTGGCCC |
| | | CATCCTCTAAGTCCACCTCTGGAGGAACAGCCGCCCTGGGCTGTCTGGT |
| | | GAAGGATTACTTCCCTGAGCCAGTGACCGTGTCCTGGAACTCTGGGGCC |
| | | CTGACCAGCGGAGTGCACACATTTCCCGCCGTGCTGCAGAGCTCCGGAC |
| | | TGTACTCCCTGTCTAGCGTGGTGACCGTGCCTTCCTCTAGCCTGGGCACC |
| | | CAGACATATATCTGCAACGTGAATCACAAGCCTTCCAATACAAAGGTCG |
| | | ACAAGAAGGTGGAGCCAAAGTCTTGTGATAAGACCCACACATGCCCAC |
| | | CTTGTCCGGCGCCAGAGGCCGCCGGAGGACCAAGCGTGTTCCTGTTTCC |
| | | ACCCAAGCCCAAGGACACCCTGATGATCTCCCGGACCCCAGAGGTGAC |
| | | ATGCGTGGTGGTGAGCGTGTCCCACGAGGACCCCGAGGTGAAGTTTAA |
| | | CTGGTACGTGGATGGCGTGGAGGTGCACAATGCCAAGACAAAGCCCCG |
| | | GGAGGAGCAGTACAATTCTACCTATAGAGTGGTGAGCGTGCTGACAGT |
| | | GCTGCACCAGGATTGGCTGAACGGCAAGGAGTATAAGTGTAAGGTGAG |
| | | CAATAAGGCCCTGCCAGCCCCCATCCTAGAAGACCATCTCCAAGGCCAA |
| | | GGGCCAGCCTCGCGAACCACAGGTGTACACTCTGCCTCCATCTCGGGAC |
| | | GAGCTGACTAAGAACCAGGTCAGTCTGACCTGTCTGGTGAAAGGATTCT |
| | | ATCCCAGCGATATCGCTGTGGAGTGGGAATCCAATGGCCAGCCTGAGA |
| | | ACAATTACAAGACCACACCCCCTGTGCTGGACTCTGATGGCAGTTTCTT |
| | | TCTGTATAGTAAGCTGACCGTCGATAAATCACGATGGCAGCAGGGGAA |
| | | CGTGTTCAGCTGTTCAGTGATGCACGAAGCCCTGCACAACCATTACACC |
| | | CAGAAGAGCCTGAGCCTGTCTCCCGGC |
| 112 | 14397 | QVQLQQPGAELVKPGASVMLSCKASGYTFTSYWMHWVKQRPGQGLEWI |
| | | GEINLRNGGTNYYEKFKTRATLTVDKSSSTAYMQLSSLTSEDSAVYYCTIL |
| | | TSAPSYWGQGTLVTVSAASTKGPSVFPLAPSSKSTSGGTAALGCLVKDYFP |
| | | EPVTVSWNSGALTSGVHTFPAVLQSSGLYSLSSVVTVPSSSLGTQTYICNVN |
| | | HKPSNTKVDKKVEPKSCDKTHTCPPCPAPEAAGGPSVFLFPPKPKDTLMISR |
| | | TPEVTCVVVSVSHEDPEVKFNWYVDGVEVHNAKTKPREEQYNSTYRVVS |
| | | VLTVLHQDWLNGKEYKCKVSNKALPAPIEKTISKAKGQPREPQVYTLPPSR |
| | | DELTKNQVSLTCLVKGFYPSDIAVEWESNGQRENNYKTTPPVLDSDGSFFL |
| | | YSKLTVDKSRWQQGNVFSCSVMHEALHNHYTQKSLSLSPG |
| 113 | 14397 | CAGGTGCAGCTGCAGCAGCCAGGAGCCGAGCTGGTGAAGCCTGGGGCC |
| | | AGCGTGATGCTGTCCTGCAAGGCCTCTGGCTACACCTTCACAAGCTATT |
| | | GGATGCACTGGGTGAAGCAGCGGCCTGGACAGGGACTGGAGTGGATCG |
| | | GCGAGATCAACCTGCGGAATGGCGGCACCAACTACTATGAGAAGTTTA |
| | | AGACAAGAGCCACCCTGACAGTGGACAAGAGCTCCTCTACCGCCTACA |
| | | TGCAGCTGAGCTCCCTGACATCTGAGGATAGCGCCGTGTACTATTGTAC |
| | | CATCCTGACATCCGCCCCCTCTTATTGGGGACAGGGCACCCTGGTGACA |
| | | GTGTCCGCCGCTAGCACAAAGGGCCCCTCCGTGTTTCCTCTGGCCCCAT |
| | | CCTCTAAGTCCACCTCTGGAGGAACAGCCGCCCTGGGCTGTCTGGTGAA |
| | | GGATTACTTCCCTGAGCCAGTGACCGTGTCCTGGAACTCTGGGGCCCTG |
| | | ACCAGCGGAGTGCACACATTTCCCGCCGTGCTGCAGAGCTCCGGACTGT |
| | | ACTCCCTGTCTAGCGTGGTGACCGTGCCTTCCTCTAGCCTGGGCACCCA |
| | | GACATATATCTGCAACGTGAATCACAAGCCTTCCAATACAAAGGTCGAC |
| | | AAGAAGGTGGAGCCAAAGTCTTGTGATAAGACCCACACATGCCCACCT |
| | | TGTCCGGCGCCAGAGGCCGCCGGAGGACCAAGCGTGTTCCTGTTTCCAC |
| | | CCAAGCCCAAGGACACCCTGATGATCTCCCGGACCCCAGAGGTGACAT |
| | | GCGTGGTGGTGAGCGTGTCCCACGAGGACCCCGAGGTGAAGTTTAACT |
| | | GGTACGTGGATGGCGTGGAGGTGCACAATGCCAAGACAAAGCCCCGGG |
| | | AGGAGCAGTACAATTCTACCTATAGAGTGGTGAGCGTGCTGACAGTGCT |
| | | GCACCAGGATTGGCTGAACGGCAAGGAGTATAAGTGTAAGGTGAGCAA |
| | | TAAGGCCCTGCCAGCCCCCATCGAGAAGACCATCTCCAAGGCCAAGGG |
| | | CCAGCCTCGCGAACCACAGGTGTACACTCTGCCTCCATCTCGGGACGAG |
| | | CTGACTAAGAACCAGGTCAGTCTGACCTGTCTGGTGAAAGGATTCTATC |
| | | CCAGCGATATCGCTGTGGAGTGGGAATCCAATGGCCAGCCTGAGAACA |
| | | ATTACAAGACCACACCCCCTGTGCTGGACTCTGATGGCAGTTTCTTTCTG |
| | | TATAGTAAGCTGACCGTCGATAAATCACGATGGCAGCAGGGGAACGTG |
| | | TTCAGCTGTTCAGTGATGCACGAAGCCCTGCACAACCATTACACCCAGA |
| | | AGAGCCTGAGCCTGTCTCCCGGC |
| 114 | 14398 | QLQESGAELLRPGASVKLSCTASGFNIKDDYLHWVKQRPEQGLEWIGWIDP |
| | | ENGDTEYASKFQGKATIKADTSSNTAYLQLSSLTSEDTAVYYCSTQGFACW |
| | | GQGTLVTVSAASTKGPSVFPLAPSSKSTSGGTAALGCLVKDYFPEPVTVSW |
| | | NSGALTSGVHTFPAVLQSSGLYSLSSVVTVPSSSLGTQTYICNVNHKPSNTK |
| | | VDKKVEPKSCDKTHTCPPCPAPEAAGGPSVFLFPPKPKDTLMISRTPEVTCV |
| | | VVSVSHEDPEVKFNWYVDGVEVHNAKTKPREEQYNSTYRVVSVLTVLHQ |
| | | DWLNGKEYKCKVSNKALPAPIEKTISKAKGQPREPQVYTLPPSRDELTKNQ |
| | | VSLTCLVKGFYPSDIAVEWESNGQPENNYKTTPPVLDSDGSFFLYSKLTVD |
| | | KSRWQQGNVFSCSVMHEALHNHYTQKSLSLSPG |
| 115 | 14398 | CAGCTGCAGGAGTCTGGAGCCGAGCTGCTGAGACCCGGGGCCAGCGTG |
| | | AAGCTTGTCTTGCACAGCCAGCGGCTTCAACATCAAGGACGATTACCTGC |
| | | ACTGGGTGAAGCAGAGACCCGAGCAGGGACTGGAGTGGATCGGATGGA |
| | | TCGACCCTGAGAACGGCGATACCGAGTACGCCAGCAAGTTTCAGGGCA |
| | | AGGCCACAATCAAGGCCGACACCAGCTCCAATACAGCCTATCTGCAGCT |
| | | GTCTAGCCTGACCTCCGAGGATACAGCCGTGTACTATTGCTCTACCCAG |
| | | GGATTCGCATGTTGGGGACAGGGCACCCTGGTGACAGTGTCCGCCGCTA |
| | | GCACAAAGGGCCCCTCCGTGTTTCCTCTGGCCCCATCCTCTAAGTCCAC |
| | | CTCTGGAGGAACAGCCGCCCTGGGCTGTCTGGTGAAGGATTACTTCCCT |
| | | GAGCCAGTGACCGTGTCCTGGAACTCTGGGGCCCTGACCAGCGGAGTG |
| | | CACACATTTCCCGCCGTGCTGCAGAGCTCCGGACTGTACTCCCTGTCTA |
| | | GCGTGGTGACCGTGCCTTCCTCTAGCCTGGGCACCCAGACATATATCTG |
| | | CAACGTGAATCACAAGCCTTCCAATACAAAGGTCGACAAGAAGGTGGA |
| | | GCCAAAGTCTTGTGATAAGACCCACACATGCCCACCTTGTCCGGCGCCA |
| | | GAGGCCGCCGGAGGACCAAGCGTGTTCCTGTTTCCACCCAAGCCCAAG |
| | | GACACCCTGATGATCTCCCGGACCCCAGAGGTGACATGCGTGGTGGTGA |
| | | GCGTGTCCCACGAGGACCCCGAGGTGAAGTTTAACTGGTACGTGGATG |
| | | GCGTGGAGGTGCACAATGCCAAGACAAAGCCCCGGGAGGAGCAGTACA |
| | | ATTCTACCTATAGAGTGGTGAGCGTGCTGACAGTGCTGCACCAGGATTG |
| | | GCTGAACGGCAAGGAGTATAAGTGTAAGGTGAGCAATAAGGCCCTGCC |
| | | AGCCCCCATCGAGAAGACCATCTCCAAGGCCAAGGGCCAGCCTCGCGA |
| | | ACCACAGGTGTACACTCTGCCTCCATCTCGGGACGAGCTGACTAAGAAC |
| | | CAGGTCAGTCTGACCTGTCTGGTGAAAGGATTCTATCCCAGCGATATCG |
| | | CTGTGGAGTGGGAATCCAATGGCCAGCCTGAGAACAATTACAAGACCA |
| | | CACCCCCTGTGCTGGACTCTGATGGCAGTTTCTTTCTGTATAGTAAGCTG |
| | | ACCGTCGATAAATCACGATGGCAGCAGGGGAACGTGTTCAGCTGTTCA |
| | | GTGATGCACGAAGCCCTGCACAACCATTACACCCAGAAGAGCCTGAGC |
| | | CTGTCTCCCGGC |
| 116 | 14399 | EVKLVESEGGLVQPGSSMKLSCTASGFTFSDYYMAWVRQVPEKGLEWVA |
| | | HINYDGSGTYYLDSLKGRFIISRDNAKNILYLQMSSLKSEDTATYYCARDC |
| | | YGSSSYAVDYWGQGTSVTVSSASTKGPSVFPLAPSSKSTSGGTAALGCLVK |
| | | DYFPEPVTVSWNSGALTSGVHTFPAVLQSSGLYSLSSVVTVPSSSLGTQTYI |
| | | CNVNHKPSNTKVDKKVEPKSCDKTHTCPPCPAPEAAGGPSVFLFPPKPKDT |
| | | LMISRTPEVTCVVVSVSHEDPEVKFNWYVDGVEVHNAKTKPREEQYNSTY |
| | | RVVSVLTVLHQDWLNGKEYKCKVSNKALPAPIEKTISKAKGQPREPQVYT |
| | | LPPSRDELTKNQVSLTCLVKGFYPSDIAVEWESNGQPENNYKTTPPVLDSD |
| | | GSFFLYSKLTVDKSRWQQGNVFSCSVMHEALHNHYTQKSLSLSPG |
| 117 | 14399 | GAGGTGAAGCTGGTGGAGAGCGAGGGAGGACTGGTGCAGCCAGGCAG |
| | | CTCCATGAAGCTGAGCTGCACCGCCTCCGGCTTCACATTTTCCGACTACT |
| | | ATATGGCATGGGTGCGGCAGGTGCCAGAGAAGGGACTGGAGTGGGTGG |
| | | CCCACATCAACTACGACGGCTCTGGCACATACTATCTGGATAGCCTGAA |
| | | GGGCCGGTTTATCATCTCCAGAGACAACGCCAAGAATATCCTGTACCTG |
| | | CAGATGTCTAGCCTGAAGTCTGAGGACACCGCCACATACTATTGCGCCA |
| | | GGGATTGTTATGGCTCCTCTAGCTACGCCGTGGATTATTGGGGCCAGGG |
| | | CACCTCTGTGACAGTGTCCTCTGCTAGCACAAAGGGCCCCTCCGTGTTT |
| | | CCTCTGGCCCCATCCTCTAAGTCCACCTCTGGAGGAACAGCCGCCCTGG |
| | | GCTGTCTGGTGAAGGATTACTTCCCTGAGCCAGTGACCGTGTCCTGGAA |
| | | CTCTGGGGCCCTGACCAGCGGAGTGCACACATTTCCCGCCGTGCTGCAG |
| | | AGCTCCGGACTGTACTCCCTGTCTAGCGTGGTGACCGTGCCTTCCTCTAG |
| | | CCTGGGCACCCAGACATATATCTGCAACGTGAATCACAAGCCTTCCAAT |
| | | ACAAAGGTCGACAAGAAGGTGGAGCCAAAGTCTTGTGATAAGACCCAC |
| | | ACATGCCCACCTTGTCCGGCGCCAGAGGCCGCCGGAGGACCAAGCGTG |
| | | TTCCTGTTTCCACCCAAGCCCAAGGACACCCTGATGATCTCCCGGACCC |
| | | CAGAGGTGACATGCGTGGTGGTGAGCGTGTCCCACGAGGACCCCGAGG |
| | | TGAAGTTTAACTGGTACGTGGATGGCGTGGAGGTGCACAATGCCAAGA |
| | | CAAAGCCCCGGGAGGAGCAGTACAATTCTACCTATAGAGTGGTGAGCG |
| | | TGCTGACAGTGCTGCACCAGGATTGGCTGAACGGCAAGGAGTATAAGT |
| | | GTAAGGTGAGCAATAAGGCCCTGCCAGCCCCCATCGAGAAGACCATCT |
| | | CCAAGGCCAAGGGCCAGCCTCGCGAACCACAGGTGTACACTCTGCCTCC |
| | | ATCTCGGGACGAGCTGACTAAGAACCAGGTCAGTCTGACCTGTCTGGTG |
| | | AAAGGATTCTATCCCAGCGATATCGCTGTGGAGTGGGAATCCAATGGCC |
| | | AGCCTGAGAACAATTACAAGACCACACCCCCTGTGCTGGACTCTGATGG |
| | | CAGTTTCTTTCTGTATAGTAAGCTGACCGTCGATAAATCACGATGGCAG |
| | | CAGGGGAACGTGTTCAGCTGTTCAGTGATGCACGAAGCCCTGCACAACC |
| | | ATTACACCCAGAAGAGCCTGAGCCTGTCTCCCGGC |
| 118 | 14400 | QVQLQESGPGLVQPTQSLSITCTVSGFSLISYGVHWVRQSPGKGLEWLGVI |
| | | WSGGSTDYNAAFISRLSISKDNSKSQVFFKMNSLQADDTAIYYCARNPLTA |
| | | TVMDYWGQGTSVTVSSASTKGPSVFPLAPSSKSTSGGTAALGCLVKDYFPE |
| | | PVTVSWNSGALTSGVHTFPAVLQSSGLYSLSSVVTVPSSSLGTQTYICNVNH |
| | | KPSNTKVDKKVEPKSCDKTHTCPPCPAPEAAGGPSVFLFPPKPKDTLMISRT |
| | | PEVTCVVVSVSHEDPEVKFNWYVDGVEVHNAKTKPREEQYNSTYRVVSV |
| | | LTVLHQDWLNGKEYKCKVSNKALPAPIEKTISKAKGQPREPQVYTLPPSRD |
| | | ELTKNQVSLTCLVKGFYPSDIAVEWESNGQPENNYKTTPPVLDSDGSFFLY |
| | | SKLTVDKSRWQQGNVFSCSVMHEALHNHYTQKSLSLSPG |
| 119 | 14400 | CAGGTGCAGCTGCAGGAGAGCGGACCAGGACTGGTGCAGCCTACACAG |
| | | TCTCTGAGCATCACCTGCACAGTGTCTGGCTTCAGCCTGATCTCCTACGG |
| | | AGTGCACTGGGTGAGGCAGTCCCCTGGCAAGGGACTGGAGTGGCTGGG |
| | | CGTGATCTGGTCTGGCGGCAGCACCGACTATAACGCCGCCTTTATCTCC |
| | | CGCCTGTCCATCTCTAAGGATAACAGCAAGTCCCAGGTGTTCTTTAAGA |
| | | TGAACAGCCTGCAGGCCGACGATACAGCCATCTACTATTGTGCCCGGAA |
| | | TCCCCTGACCGCCACAGTGATGGACTACTGGGGCCAGGGCACCTCTGTG |
| | | ACAGTGAGCTCCGCTAGCACAAAGGGCCCCTCCGTGTTTCCTCTGGCCC |
| | | CATCCTCTAAGTCCACCTCTGGAGGAACAGCCGCCCTGGGCTGTCTGGT |
| | | GAAGGATTACTTCCCTGAGCCAGTGACCGTGTCCTGGAACTCTGGGGCC |
| | | CTGACCAGCGGAGTGCACACATTTCCCGCCGTGCTGCAGAGCTCCGGAC |
| | | TGTACTCCCTGTCTAGCGTGGTGACCGTGCCTTCCTCTAGCCTGGGCACC |
| | | CAGACATATATCTGCAACGTGAATCACAAGCCTTCCAATACAAAGGTCG |
| | | ACAAGAAGGTGGAGCCAAAGTCTTGTGATAAGACCCACACATGCCCAC |
| | | CTTGTCCGGCGCCAGAGGCCGCCGGAGGACCAAGCGTGTTCCTGTTTCC |
| | | ACCCAAGCCCAAGGACACCCTGATGATCTCCCGGACCCCAGAGGTGAC |
| | | ATGCGTGGTGGTGAGCGTGTCCCACGAGGACCCCGAGGTGAAGTTTAA |
| | | CTGGTACGTGGATGGCGTGGAGGTGCACAATGCCAAGACAAAGCCCCG |
| | | GGAGGAGCAGTACAATTCTACCTATAGAGTGGTGAGCGTGCTGACAGT |
| | | GCTGCACCAGGATTGGCTGAACGGCAAGGAGTATAAGTGTAAGGTGAG |
| | | CAATAAGGCCCTGCCAGCCCCCATCGAGAAGACCATCTCCAAGGCCAA |
| | | GGGCCAGCCTCGCGAACCACAGGTGTACACTCTGCCTCCATCTCGGGAC |
| | | GAGCTGACTAAGAACCAGGTCAGTCTGACCTGTCTGGTGAAAGGATTCT |
| | | ATCCCAGCGATATCGCTGTGGAGTGGGAATCCAATGGCCAGCCTGAGA |
| | | ACAATTACAAGACCACACCCCCTGTGCTGGACTCTGATGGCAGTTTCTT |
| | | TCTGTATAGTAAGCTGACCGTCGATAAATCACGATGGCAGCAGGGGAA |
| | | CGTGTTCAGCTGTTCAGTGATGCACGAAGCCCTGCACAACCATTACACC |
| | | CAGAAGAGCCTGAGCCTGTCTCCCGGC |
| 120 | 14401 | QVQLKESGPGLVAPSQSLSITCTVSGFSLTSYAISWVRQPPGKGLEWLGVIW |
| | | PGGGTNYNSALKSRLSISKDNSKSQVFLKMNSLQTDDTARYYCARGTGTW |
| | | YFDVWGAGTTVTVSSASTKGPSVFPLAPSSKSTSGGTAALGCLVKDYFPEP |
| | | VTVSWNSGALTSGVHTFPAVLQSSGLYSLSSVVTVPSSSLGTQTYICNVNH |
| | | KPSNTKVDKKVEPKSCDKTHTCPPCPAPEAAGGPSVFLFPPKPKDTLMISRT |
| | | PEVTCVVVSVSHEDPEVKFNWYVDGVEVHNAKTKPREEQYNSTYRVVSV |
| | | LTVLHQDWLNGKEYKCKVSNKALPAPIEKTISKAKGQPREPQVYTLPPSRD |
| | | ELTKNQVSLTCLVKGFYPSDIAVEWESNGQPENNYKTTPPVLDSDGSFFLY |
| | | SKLTVDKSRWQQGNVFSCSVMHEALHNHYTQKSLSLSPG |
| 121 | 14401 | CAGGTGCAGCTGAAGGAGTCTGGACCAGGACTGGTGGCCCCCTCTCAG |
| | | AGCCTGTCCATCACCTGCACAGTGAGCGGCTTTTCCCTGACCTCTTACGC |
| | | AATCTCCTGGGTGCGGCAGCCACCTGGCAAGGGACTGGAGTGGCTGGG |
| | | CGTGATCTGGCCAGGAGGAGGCACAAACTATAATAGCGCCCTGAAGTC |
| | | CAGGCTGTCTATCAGCAAGGACAACTCCAAGTCTCAGGTGTTCCTGAAG |
| | | ATGAATAGCCTGCAGACCGACGATACAGCCCGGTACTATTGTGCCAGA |
| | | GGCACCGGCACATGGTACTTTGACGTGTGGGGGGCAGGGACCACAGTG |
| | | ACAGTGAGCTCCGCTAGCACAAAGGGCCCCTCCGTGTTTCCTCTGGCCC |
| | | CATCCTCTAAGTCCACCTCTGGAGGAACAGCCGCCCTGGGCTGTCTGGT |
| | | GAAGGATTACTTCCCTGAGCCAGTGACCGTGTCCTGGAACTCTGGGGCC |
| | | CTGACCAGCGGAGTGCACACATTTCCCGCCGTGCTGCAGAGCTCCGGAC |
| | | TGTACTCCCTGTCTAGCGTGGTGACCGTGCCTTCCTCTAGCCTGGGCACC |
| | | CAGACATATATCTGCAACGTGAATCACAAGCCTTCCAATACAAAGGTCG |
| | | ACAAGAAGGTGGAGCCAAAGTCTTGTGATAAGACCCACACATGCCCAC |
| | | CTTGTCCGGCGCCAGAGGCCGCCGGAGGACCAAGCGTGTTCCTGTTTCC |
| | | ACCCAAGCCCAAGGACACCCTGATGATCTCCCGGACCCCAGAGGTGAC |
| | | ATGCGTGGTGGTGAGCGTGTCCCACGAGGACCCCGAGGTGAAGTTTAA |
| | | CTGGTACGTGGATGGCGTGGAGGTGCACAATGCCAAGACAAAGCCCCG |
| | | GGAGGAGCAGTACAATTCTACCTATAGAGTGGTGAGCGTGCTGACAGT |
| | | GCTGCACCAGGATTGGCTGAACGGCAAGGAGTATAAGTGTAAGGTGAG |
| | | CAATAAGGCCCTGCCAGCCCCCATCGAGAAGACCATCTCCAAGGCCAA |
| | | GGGCCAGCCTCGCGAACCACAGGTGTACACTCTGCCTCCATCTCGGGAC |
| | | GAGCTGACTAAGAACCAGGTCAGTCTGACCTGTCTGGTGAAAGGATTCT |
| | | ATCCCAGCGATATCGCTGTGGAGTGGGAATCCAATGGCCAGCCTGAGA |
| | | ACAATTACAAGACCACACCCCCTGTGCTGGACTCTGATGGCAGTTTCTT |
| | | TCTGTATAGTAAGCTGACCGTCGATAAATCACGATGGCAGCAGGGGAA |
| | | CGTGTTCAGCTGTTCAGTGATGCACGAAGCCCTGCACAACCATTACACC |
| | | CAGAAGAGCCTGAGCCTGTCTCCCGGC |
| 122 | 14402 | DVVMTQTPLSLPVSLGDQASISCRSSQSIVHSNGNTYLEWYLQKPGQSPKL |
| | | LIYKVSNRFSGVPDRFSARGSGTDFSLKISRVEAEDLGVYYCFQGSHVPYTF |
| | | GGGTKLEIKRTVAAPSVFIFPPSDEQLKSGTASVVCLLNNFYPREAKVQWK |
| | | VDNALQSGNSQESVTEQDSKDSTYSLSSTLTLSKADYEKHKVYACEVTHQ |
| | | GLSSPVTKSFNRGEC |
| 123 | 14402 | GACGTGGTCATGACCCAGACACCCCTGTCCCTGCCCGTGAGCCTGGGCG |
| | | ACCAGGCCTCTATCAGCTGCAGGAGCTCCCAGAGCATCGTGCACTCCAA |
| | | CGGCAATACCTACCTGGAGTGGTATCTGCAGAAGCCAGGCCAGTCTCCC |
| | | AAGCTGCTGATCTACAAGGTGTCTAACCGGTTCAGCGGAGTGCCAGACC |
| | | GGTTTTCCGCCAGAGGCTCTGGCACAGACTTCAGCCTGAAGATCTCCAG |
| | | AGTGGAGGCCGAGGACCTGGGCGTGTACTATTGTTTCCAGGGCTCCCAC |
| | | GTGCCTTATACCTTTGGCGGCGGCACAAAGCTGGAGATCAAGAGAACA |
| | | GTGGCGGCGCCCAGTGTCTTCATTTTTCCCCCTAGCGACGAACAGCTGA |
| | | AGTCTGGGACAGCCAGTGTGGTCTGTCTGCTGAACAACTTCTACCCTAG |
| | | AGAGGCTAAAGTGCAGTGGAAGGTCGATAACGCACTGCAGTCCGGAAA |
| | | TTCTCAGGAGAGTGTGACTGAACAGGACTCAAAAGATAGCACCTATTCC |
| | | CTGTCAAGCACACTGACTCTGAGCAAGGCCGACTACGAGAAGCATAAA |
| | | GTGTATGCTTGTGAAGTCACCCACCAGGGGCTGAGTTCACCAGTCACAA |
| | | AATCATTCAACAGAGGGGAGTGC |
| 124 | 14404 | DIVMTQSHKFMSTSVGDRVSITCKASQDVGTAVGWYQQKLGQSPKLLIYW |
| | | ASTRRTGVPDRFTGSGSGTDFTLTISNVQSEDLADYFCQQYSSYPLTFGAGT |
| | | KLELKRTVAAPSVFIFPPSDEQLKSGTASVVCLLNNFYPREAKVQWKVDNA |
| | | LQSGNSQESVTEQDSKDSTYSLSSTLTLSKADYEKHKVYACEVTHQGLSSP |
| | | VTKSFNRGEC |
| 125 | 14404 | GACATCGTGATGACCCAGAGCCACAAGTTTATGTCTACAAGCGTGGGCG |
| | | ACCGCGTGTCTATCACCTGCAAGGCCAGCCAGGATGTGGGAACAGCCG |
| | | TGGGCTGGTACCAGCAGAAGCTGGGCCAGTCCCCCAAGCTGCTGATCTA |
| | | TTGGGCCTCTACCCGGAGAACAGGAGTGCCTGACCGGTTCACCGGCTCC |
| | | GGCTCTGGCACAGACTTCACCCTGACAATCAGCAACGTGCAGTCCGAGG |
| | | ACCTGGCCGATTACTTCTGTCAGCAGTACAGCTCCTATCCCCTGACCTTC |
| | | GGGGCAGGGACAAAGCTGGAGCTGAAGAGGACAGTGGCGGCGCCCAG |
| | | TGTCTTCATTTTTCCCCCTAGCGACGAACAGCTGAAGTCTGGGACAGCC |
| | | AGTGTGGTCTGTCTGCTGAACAACTTCTACCCTAGAGAGGCTAAAGTGC |
| | | AGTGGAAGATCGATAACGCACTGCAGTCCGGAAATTCTCAGGAGAGTG |
| | | TGACTGAACAGGACTCAAAAGATAGCACCTATTCCCTGTCAAGCACACT |
| | | GACTCTGAGCAAGGCCGACTACGAGAAGCATAAAGTGTATGCTTGTGA |
| | | AGTCACCCACCAGGGGCTGAGTTCACCAGTCACAAAATCATTCAACAG |
| | | AGGGGAGTGC |
| 126 | 14405 | DIVMTQSQKFMSTSVGDRVSVTCKASQNVGTNVAWYQQKPGQSRTVLIYS |
| | | ASYRHSGVPDRFTGSGSGTDFTLTISNVQSEDLAEYFCQQYNSYPLTFGTGT |
| | | KLELKRTVAAPSVFIFPPSDEQLKSGTASVVCLLNNFYPREAKVQWKVDNA |
| | | LQSGNSQESVTEQDSKDSTYSLSSTLTLSKADYEKHKVYACEVTHQGLSSP |
| | | VTKSFNRGEC |
| 127 | 14405 | GACATCGTGATGACCCAGAGCCAGAAGTTTATGAGCACATCCGTGGGC |
| | | GATCGCGTGTCTGTGACCTGCAAGGCCAGCCAGAACGTGGGCACAAAT |
| | | GTGGCCTGGTACCAGCAGAAGCCAGGCCAGTCCCGGACAGTGCTGATC |
| | | TACTCTGCCAGCTATCGGCACTCTGGAGTGCCAGACAGATTCACCGGCT |
| | | CCGGCTCTGGCACAGACTTCACCCTGACAATCAGCAACGTGCAGTCCGA |
| | | GGACCTGGCCGAGTATTTCTGTCAGCAGTACAATTCCTATCCCCTGACC |
| | | TTTGGCACCGGCACAAAGCTGGAGCTGAAGAGGACAGTGGCGGCGCCC |
| | | AGTGTCTTCATTTTTCCCCCTAGCGACGAACAGCTGAAGTCTGGGACAG |
| | | CCAGTGTGGTCTGTCTGCTGAACAACTTCTACCCTAGAGAGGCTAAAGT |
| | | GCAGTGGAAGGTCGATAACGCACTGCAGTCCGGAAATTCTCAGGAGAG |
| | | TGTGACTGAACAGGACTCAAAAGATAGCACCTATTCCCTGTCAAGCACA |
| | | CTGACTCTGAGCAAGGCCGACTACGAGAAGCATAAAGTGTATGCTTGTG |
| | | AAGTCACCCACCAGGGGCTGAGTTCACCAGTCACAAAATCATTCAACA |
| | | GAGGGGAGTGC |
| 128 | 14406 | DIVMTQAAFSNPVTLGTSASISCRSSKSLLHSYGITYLYWYLQKPGQSPQLLI |
| | | YQMSNLASGVPDRFSSSGSGTDFTLRISRVEAEDVGVYYCAQNLELPLTFG |
| | | AGTKLELKRTVAAPSVFIFPPSDEQLKSGTASVVCLLNNFYPREAKVQWKV |
| | | DNALQSGNSQESVTEQDSKDSTYSLSSTLTLSKADYEKHKVYACEVTHQG |
| | | LSSPVTKSFNRGEC |
| 129 | 14406 | GACATCGTGATGACACAGGCCGCCTTTTCTAACCCCGTGACCCTGGGCA |
| | | CATCTGCCAGCATCTCCTGCCGGAGCTCCAAGTCTCTGCTGCACAGCTA |
| | | TGGCATCACCTACCTGTATTGGTACCTGCAGAAGCCCGGCCAGTCCCCT |
| | | CAGCTGCTGATCTACCAGATGTCCAACCTGGCCTCTGGCGTGCCTGACA |
| | | GGTTCTCTAGCTCCGGCAGCGGAACCGACTTCACCCTGCGGATCTCCAG |
| | | AGTGGAGGCCGAGGATGTGGGCGTGTACTATTGTGCCCAGAATCTGGA |
| | | GCTGCCACTGACCTTCGGGGCAGGGACAAAGCTGGAGCTGAAGCGGAC |
| | | AGTGGCGGCGCCCAGTGTCTTCATTTTTCCCCCTAGCGACGAACAGCTG |
| | | AAGTCTGGGACAGCCAGTGTGGTCTGTCTGCTGAACAACTTCTACCCTA |
| | | GAGAGGCTAAAGTGCAGTGGAAGGTCGATAACGCACTGCAGTCCGGAA |
| | | ATTCTCAGGAGAGTGTGACTGAACAGGACTCAAAAGATAGCACCTATTC |
| | | CCTGTCAAGCACACTGACTCTGAGCAAGGCCGACTACGAGAAGCATAA |
| | | AGTGTATGCTTGTGAAGTCACCCACCAGGGGCTGAGTTCACCAGTCACA |
| | | AAATCATTCAACAGAGGGGAGTGC |
| 130 | 14407 | QIVLTQSPAIMSASPGEKVTMTCSASSSVSYMHWYQQKSGTSPKRWVYDT |
| | | SKLASGVPARFSGSGSGTSYSLTISSMEAEDVATYYCQQWSSNPPTFGGGT |
| | | KLEIKRTVAAPSVFIFPPSDEQLKSGTASVVCLLNNFYPREAKVQWKVDNA |
| | | LQSGNSQESVTEQDSKDSTYSLSSTLTLSKADYEKHKVYACEVTHQGLSSP |
| | | VTKSFNRGEC |
| 131 | 14407 | CAGATCGTGCTGACACAGAGCCCAGCCATCATGTCCGCCTCTCCAGGAG |
| | | AGAAGGTGACCATGACATGCAGCGCCAGCTCCAGCGTGAGCTACATGC |
| | | ACTGGTATCAGCAGAAGTCTGGCACCAGCCCTAAGCGGTGGGTGTACG |
| | | ACACATCCAAGCTGGCCTCTGGAGTGCCAGCCAGATTCAGCGGCTCCGG |
| | | CTCTGGCACCAGCTATTCCCTGACAATCAGCTCCATGGAGGCCGAGGAT |
| | | GTGGCCACCTACTATTGTCAGCAGTGGTCTAGCAACCCCCCTACCTTTG |
| | | GCGGCGGCACAAAGCTGGAGATCAAGCGGACAGTGGCGGCGCCCAGTG |
| | | TCTTCATTTTTCCCCCTAGCGACGAACAGCTGAAGTCTGGGACAGCCAG |
| | | TGTGGTCTGTCTGCTGAACAACTTCTACCCTAGAGAGGCTAAAGTGCAG |
| | | TGGAAGGTCGATAACGCACTGCAGTCCGGAAATTCTCAGGAGAGTGTG |
| | | ACTGAACAGGACTCAAAAGATAGCACCTATTCCCTGTCAAGCACACTGA |
| | | CTCTGAGCAAGGCCGACTACGAGAAGCATAAAGTGTATGCTTGTGAAG |
| | | TCACCCACCAGGGGCTGAGTTCACCAGTCACAAAATCATTCAACAGAG |
| | | GGGAGTGC |
| 132 | 14408 | DVVMTQTPLSLPVSLGDQASISCRSSQSLVHSNGNTYLHWYLQKPGQSPKL |
| | | LIYKVSNRFFGVPDRFSGSGSGTDFTLKISRVEAEDLGVYFCSQTTYVPLTF |
| | | GAGTKLELKRTVAAPSVFIFPPSDEQLKSGTASVVCLLNNFYPREAKVQWK |
| | | VDNALQSGNSQESVTEQDSKDSTYSLSSTLTLSKADYEKHKVYACEVTHQ |
| | | GLSSPVTKSFNRGEC |
| 133 | 14408 | GACGTGGTCATGACCCAGACACCCCTGTCCCTGCCCGTGAGCCTGGGCG |
| | | ACCAGGCCTCTATCAGCTGCCGGAGCTCCCAGAGCCTGGTGCACTCCAA |
| | | CGGCAATACATACCTGCACTGGTATCTGCAGAAGCCAGGCCAGTCTCCC |
| | | AAGCTGCTGATCTACAAGGTGAGCAACCGGTTCTTTGGCGTGCCCGACA |
| | | GATTCTCCGGCTCTGGCAGCGGAACCGACTTCACCCTGAAGATCTCCCG |
| | | GGTGGAGGCAGAGGACCTGGGCGTGTACTTCTGTTCTCAGACCACATAT |
| | | GTGCCTCTGACCTTCGGGGCAGGGACAAAGCTGGAGCTGAAGAGGACC |
| | | GTGGCGGCGCCCAGTGTCTTCATTTTTCCCCCTAGCGACGAACAGCTGA |
| | | AGTCTGGGACAGCCAGTGTGGTCTGTCTGCTGAACAACTTCTACCCTAG |
| | | AGAGGCTAAAGTGCAGTGGAAGGTCGATAACGCACTGCAGTCCGGAAA |
| | | TTCTCAGGAGAGTGTGACTGAACAGGACTCAAAAGATAGCACCTATTCC |
| | | CTGTCAAGCACACTGACTCTGAGCAAGGCCGACTACGAGAAGCATAAA |
| | | GTGTATGCTTGTGAAGTCACCCACCAGGGGCTGAGTTCACCAGTCACAA |
| | | AATCATTCAACAGAGGGGAGTGC |
| 134 | 14409 | NIVMTQSPKSMSMSVGERVTLSCKASENVGSYVSWYQQKPEKSPKLLIYG |
| | | ASNRYTGVPDRFTGSGSATDFTLTISSVQAEDLADYHCGQSYSYPLTFGAG |
| | | TKLELKRTVAAPSVFIFPPSDEQLKSGTASVVCLLNNFYPREAKVQWKVDN |
| | | ALQSGNSQESVTEQDSKDSTYSLSSTLTLSKADYEKHKVYACEVTHQGLSS |
| | | PVTKSFNRGEC |
| 135 | 14409 | AACATCGTGATGACCCAGTCCCCCAAGTCTATGAGCATGTCCGTGGGCG |
| | | AGCGCGTGACACTGTCTTGCAAGGCCAGCGAGAACGTGGGCAGCTACG |
| | | TGTCCTGGTATCAGCAGAAGCCCGAGAAGTCCCCTAAGCTGCTGATCTA |
| | | CGGGGCCAGCAATCGGTATACCGGCGTGCCTGACAGATTCACCGGCTCT |
| | | GGCAGCGCCACAGACTTCACCCTGACAATCAGCTCCGTGCAGGCAGAG |
| | | GACCTGGCAGATTACCACTGTGGCCAGTCCTACTCTTATCCACTGACCTT |
| | | CGGGGCAGGGACAAAGCTGGAGCTGAAGAGGACAGTGGCGGCGCCCA |
| | | GTGTCTTCATTTTTCCCCCTAGCGACGAACAGCTGAAGTCTGGGACAGC |
| | | CAGTGTGGTCTGTCTGCTGAACAACTTCTACCCTAGAGAGGCTAAAGTG |
| | | CAGTGGAAGGTCGATAACGCACTGCAGTCCGGAAATTCTCAGGAGAGT |
| | | GTGACTGAACAGGACTCAAAAGATAGCACCTATTCCCTGTCAAGCACAC |
| | | TGACTCTGAGCAAGGCCGACTACGAGAAGCATAAAGTGTATGCTTGTG |
| | | AAGTCACCCACCAGGGGCTGAGTTCACCAGTCACAAAATCATTCAACA |
| | | GAGGGGAGTGC |
| 136 | 14410 | DIVMTQSPSSLAVTAGEKVTMRCKSSQSLLWSVNQNNYLSWYQQKQGQP |
| | | PKLLIYGASIRESWVPDRFTGSGSGTDFTLTISNVHAEDLAVYYCQHNHGSF |
| | | LPYTFGGGTKLEIKRTVAAPSVFIFPPSDEQLKSGTASVVCLLNNFYPREAK |
| | | VQWKVDNALQSGNSQESVTEQESKDSTYSLSSTLTLSKADYEKHKVYACE |
| | | VTHQGLSSPVTKSFNRGEC |
| 137 | 14410 | GACATCGTGATGACACAGAGCCCAAGCTCCCTGGCCGTGACCGCCGGG |
| | | GAGAAGGTGACAATGCGGTGCAAGTCTAGCCAGAGCCTGCTGTGGTCC |
| | | GTGAACCAGAACAATTACCmTCCTGGTATCAGCAGAAGCAGGGCCAG |
| | | CCCCCTAAGCTGCTGATCTACGGGGCCAGCATCCGGGAGAGCTGGGTGC |
| | | CTGACAGATTCACCGGCTCCGGCTCTGGCACAGACTTCACCCTGACAAT |
| | | CTCCAACGTGCACGCCGAGGATCTGGCCGTGTACTATTGTCAGCACAAT |
| | | CACGGCTCTTTCCTGCCATATACCTTTGGCGGCGGCACAAAGCTGGAGA |
| | | TCAAGAGGACCGTGGCGGCGCCCAGTGTCTTCATTTTTCCCCCTAGCGA |
| | | CGAACAGCTGAAGTCTGGGACAGCCAGTGTGGTCTGTCTGCTGAACAAC |
| | | TTCTACCCTAGAGAGGCTAAAGTGCAGTGGAAGGTCGATAACGCACTG |
| | | CAGTCCGGAAATTCTCAGGAGAGTGTGACTGAACAGGACTCAAAAGAT |
| | | AGCACCTATTCCCTGTCAAGCACACTGACTCTGAGCAAGGCCGACTACG |
| | | AGAAGCATAAAGTGTATGCTTGTGAAGTCACCCACCAGGGGCTGAGTTC |
| | | ACCAGTCACAAAATCATTCAACAGAGGGGAGTGC |
| 138 | 14411 | DIQMTQTTSSLSASLGDRVTFSCSASQGISNYLNWYQQKPDGTVKLLIYYTS |
| | | SLHLGVPSRFSGSGSGTDYSLTISNLEPEDIATYYCQQYSKLPWTFGGGTKL |
| | | EIKRTVAAPSVFIFPPSDEQLKSGTASVVCLLNNFYPREAKVQWKVDNALQ |
| | | SGNSQESVTEQDSKDSTYSLSSTLTLSKADYEKHKVYACEVTHQGLSSPVT |
| | | KSFNRGEC |
| 139 | 14411 | GACATCCAGATGACCCAGACCACAAGCTCCCTGTCCGCCTCTCTGGGCG |
| | | ATAGAGTGACCTTCAGCTGCTCCGCCTCTCAGGGCATCTCTAACTACCT |
| | | GAATTGGTATCAGCAGAAGCCTGACGGCACCGTGAAGCTGCTGATCTAC |
| | | TATACATCTAGCCTGCACCTGGGCGTGCCATCCAGGTTCAGCGGCTCCG |
| | | GCTCTGGAACCGACTACAGCCTGACAATCTCCAACCTGGAGCCCGAGG |
| | | ATATCGCCACCTACTATTGTCAGCAGTATAGCAAGCTGCCTTGGACCTT |
| | | TGGCGGCGGCACAAAGCTGGAGATCAAGCGCACAGTGGCGGCGCCCAG |
| | | TGTCTTCATTTTTCCCCCTAGCGACGAACAGCTGAAGTCTGGGACAGCC |
| | | AGTGTGGTCTGTCTGCTGAACAACTTCTACCCTAGAGAGGCTAAAGTGC |
| | | AGTGGAAGGTCGATAACGCACTGCAGTCCGGAAATTCTCAGGAGAGTG |
| | | TGACTGAACAGGACTCAAAAGATAGCACCTATTCCCTGTCAAGCACACT |
| | | GACTCTGAGCAAGGCCGACTACGAGAAGCATAAAGTGTATGCTTGTGA |
| | | AGTCACCCACCAGGGGCTGAGTTCACCAGTCACAAAATCATTCAACAG |
| | | AGGGGAGTGC |
| 140 | 14412 | NIVMTQSPKSMSMSVGERVTLSCKASDNVGISVSWYQQKPEQSPKLLIYGA |
| | | SNRYTGVPDRFTGTGSATDFTLTISSVQAEDLADYHCGQSYSYPFTFGSGTK |
| | | LEIKRTVAAPSVFIFPPSDEQLKSGTASVVCLLNNFYPREAKVQWKVDNAL |
| | | QSGNSQESVTEQDSKDSTYSLSSTLTLSKADYEKHKVYACEVTHQGLSSPV |
| | | TKSFNRGEC |
| 141 | 14412 | AACATCGTGATGACCCAGTCCCCCAAGTCTATGAGCATGTCCGTGGGCG |
| | | AGCGCGTGACACTGAGCTGCAAGGCCTCCGACAACGTGGGCATCTCTGT |
| | | GAGCTGGTACCAGCAGAAGCCCGAGCAGTCTCCTAAGCTGCTGATCTAC |
| | | GGGGCCAGCAATCGGTATACCGGCGTGCCTGACAGATTCACCGGCACA |
| | | GGCTCCGCCACAGACTTCACCCTGACAATCAGCTCCGTGCAGGCAGAGG |
| | | ACCTGGCAGATTATCACTGTGGCCAGTCCTACTCTTATCCATTCACCTTT |
| | | GGCTCTGGCACAAAGCTGGAGATCAAGAGGACAGTGGCGGCGCCCAGT |
| | | GTCTTCATTTTTCCCCCTAGCGACGAACAGCTGAAGTCTGGGACAGCCA |
| | | GTGTGGTCTGTCTGCTGAACAACTTCTACCCTAGAGAGGCTAAAGTGCA |
| | | GTGGAAGGTCGATAACGCACTGCAGTCCGGAAATTCTCAGGAGAGTGT |
| | | GACTGAACAGGACTCAAAAGATAGCACCTATTCCCTGTCAAGCACACTG |
| | | ACTCTGAGCAAGGCCGACTACGAGAAGCATAAAGRTTATGCTTGTGAA |
| | | GTCACCCACCAGGGGCTGAGTTCACCAGTCACAAAATCATTCAACAGA |
| | | GGGGAGTGC |
| 142 | 18509 | QVQLKESGPGLVAPSQSLSITCTVSGFSLTTYAISWVRQPPGKGLEWLGIIW |
| | | PGGGTNYNSALKSRLSISKDNSRSQVFLKMNSLQTDDTARYYCARGAGTW |
| | | YFDVWGAGTTVTVSSASTKGPSVFPLAPSSKSTSGGTAALGCLVKDYFPEP |
| | | VTVSWNSGALTSGVHTFPAVLQSSGLYSLSSVVTVPSSSLGTQTYICNVNH |
| | | KPSNTKVDKKVEPKSCDKTHTCPPCPAPEAAGGPSVFLFPPKPKDTLMISRT |
| | | PEVTCVVVSVSHEDPEVKFNWYVDGVEVHNAKTKPREEQYNSTYRVVSV |
| | | LTVLHQDWLNGKEYKCKVSNKALPAPIEKTISKAKGQPREPQVYVYPPSRD |
| | | ELTKNQVSLTCLVKGFYPSDIAVEWESNGQPENNYKTTPPVLDSDGSFALV |
| | | SKLTVDKSRWQQGNVFSCSVMHEALHNHYTQKSLSLSPGGGGGQEQLVES |
| | | GGGLVQPEGSLTLTCTASKFSFSSLYYMCWVRQAPGKGLEWIACVYGGSS |
| | | GNTYYASWAKGRFTISKASSTTVTLQLTSLTAADTATYFCARFDVDGSGFN |
| | | LWGPGTLVTVSSGGGGSGGGGSGGGGSDIVMTQTPSSVSAAVGGTVTIKC |
| | | QASQTIGSSLAWYQQKPGQPPKLLIYRASTLASGVSSRFRGSGSGTEYTLTIS |
| | | DLECADAATYYCQWTDYGYIYIWAFGGGTEVVVK |
| 143 | 18509 | CAGGTGCAGGGAAGGAGTCCGGACCAGGACTGGTGGCCCCCTCTCAG |
| | | AGCCTGTCCATCACCTGCACAGTGAGCGGCTTTTCCCTGACCACATACG |
| | | CAATCTCTTGGGTGCGGCAGCCACCTGGCAAGGGACTGGAGTGGCTGG |
| | | GAATCATCTGGCCAGGAGGAGGCACAAACTATAATTCTGCCCTGAAGA |
| | | GCAGGCTGTCTATCAGCAAGGACAACTCCCGCTCTCAGGTGTTCCTGAA |
| | | GATGAACAGCCTGCAGACCGACGATACAGCAAGGTACTATTGTGCCCG |
| | | GGGGGCAGGGACCTGGTACTTTGACGTGTGGGGGGCAGGGACCACAGT |
| | | GACAGTGAGCTCCGCTAGCACAAAGGGCCCCTCCGTGTTTCCTCTGGCC |
| | | CCATCCTCTAAGTCCACCTCTGGAGGAACAGCCGCCCTGGGCTGTCTGG |
| | | TGAAGGATTACTTCCCTGAGCCAGTGACCGTGTCCTGGAACTCTGGGGC |
| | | CCTGACCAGCGGAGTGCACACATTTCCCGCCGTGCTGCAGAGCTCCGGA |
| | | CTGTACTCCCTGTCTAGCGTGGTGACCGTGCCTTCCTCTAGCCTGGGCAC |
| | | CCAGACATATATCTGCAACGTGAATCACAAGCCTTCCAATACAAAGGTC |
| | | GACAAGAAGGTGGAGCCAAAGTCTTGTGATAAGACCCACACATGCCCA |
| | | CCTTGTCCGGCGCCAGAGGCCGCCGGAGGACCAAGCGTGTTCCTGTTTC |
| | | CACCCAAGCCCAAGGACACCCTGATGATCTCCCGGACCCCAGAGGTGA |
| | | CATGCGTGGTGGTGAGCGTGTCCCACGAGGACCCCGAGGTGAAGTTTA |
| | | ACTGGTACGTGGATGGCGTGGAGGTGCACAATGCCAAGACAAAGCCCC |
| | | GGGAGGAGCAGTACAATTCTACCTATAGAGTGGTGAGCGTGCTGACAG |
| | | TGCTGCACCAGGATTGGCTGAACGGCAAGGAGTATAAGTGTAAGGTGA |
| | | GCAATAAGGCCCTGCCAGCCCCCATCGAGAAGACCATCTCCAAGGCCA |
| | | AGGGCCAGCCTCGCGAGCCCCAGGTGTACGTGTATCCCCCTAGCAGAG |
| | | ACGAGCTGACAAAGAACCAGGTGTCCCTGACCTGCCTGGTGAAGGGCT |
| | | TCTATCCCTCTGATATCGCCGTGGAGTGGGAGAGCAATGGCCAGCCTGA |
| | | GAACAATTACAAGACCACACCACCCGTGCTGGACAGCGATGGCTCCTTC |
| | | GCCCTGGTGAGCAAGCTGACAGTGGACAAGTCCAGGTGGCAGCAGGGC |
| | | AACGTGTTTTCTTGTAGCGTGATGCACGAGGCCCTGCACAATCACTATA |
| | | CCCAGAAGTCCCTGTCTCTGAGCCCAGGAGGAGGAGGAGGACAGGAGC |
| | | AGCTGGTGGAGTCTGGCGGCGGCCTGGTGCAGCCAGAGGGCTCCCTGA |
| | | CCCTGACATGCACCGCCTCTAAGTTCAGCTTTAGCTCCCTGTACTATATG |
| | | TGCTGGGTGAGGCAGGCCCCCGGCAAGGGACTGGAGTGGATCGCCTGC |
| | | GTGTATGGCGGCTCTAGCGGCAACACCTACTATGCCTCCTGGGCCAAGG |
| | | GCCGCTTCACAATCTCTAAGGCCTCCTCTACCACAGTGACCCTGCAGCT |
| | | GACAAGCCTGACCGCCGCCGACACAGCCACCTACTTCTGTGCCCGGTTT |
| | | GACGTGGATGGCTCCGGCTTTAATCTGTGGGGCCCTGGCACACTGGTGA |
| | | CCGTGAGCTCCGGAGGAGGAGGCAGCGGAGGAGGAGGCTCCGGCGGC |
| | | GGCGGCTCTGATATCGTGATGACACAGACCCCATCTAGCGTGAGCGCCG |
| | | CCGTGGGAGGCACAGTGACCATCAAGTGCCAGGCCTCCCAGACCATCG |
| | | GCTCCTCTCTGGCCTGGTATCAGCAGAAGCCTGGCCAGCCTCCAAAGCT |
| | | GCTGATCTACAGAGCCTCCACACTGGCCTCTGGCGTGAGCTCCCGGTTC |
| | | AGAGGCTCCGGCTCTGGAACCGAGTACACACTGACCATCAGCGACCTG |
| | | GAGTGCGCAGATGCAGCAACATACTATTGTCAGTGGACCGATTACGGCT |
| | | ATATCTACATCTGGGCCTTTGGCGGAGGAACCGAGGTGGTGGTGAAG |
| 144 | 14414 | DVLMTQTPLSLPVSLGDQASISCRSSQSIVHSNGNTYLEWYLQKPGQSPKLL |
| | | IYKVSNRFSGVPDRFSGSGSGTDFTLKISRVEAEDLGVYYCFQGSHVPWTF |
| | | GGGTKLEIKRTVAAPSVFIFPPSDEQLKSGTASVVCLLNNFYPREAKVQWK |
| | | VDNALQSGNSQESVTEQDSKDSTYSLSSTLTLSKADYEKHKVYACEVTHQ |
| | | GLSSPVTKSFNRGEC |
| 145 | 14414 | GACGTGCTGATGACCCAGACACCCCTGTCCCTGCCCGTGAGCCTGGGCG |
| | | ACCAGGCCTCTATCAGCTGCCGGAGCTCCCAGAGCATCGTGCACTCCAA |
| | | CGGCAATACATACCTGGAGTGGTATCTGCAGAAGCCAGGCCAGTCCCCC |
| | | AAGCTGCTGATCTACAAGGTGTCTAACCGGTTCAGCGGCGTGCCCGACA |
| | | GATTTTCCGGCTCTGGCAGCGGAACCGACTTCACCCTGAAGATCTCCCG |
| | | GGTGGAGGCAGAGGACCTGGGCGTGTACTATTGTTTCCAGGGCTCTCAC |
| | | GTGCCTTGGACCTTTGGCGGCGGCACAAAGCTGGAGATCAAGAGGACC |
| | | GTGGCGGCGCCCAGTGTCTTCATTTTTCCCCCTAGCGACGAACAGCTGA |
| | | AGTCTGGGACAGCCAGTGTGGTCTGTCTGCTGAACAACTTCTACCCTAG |
| | | AGAGGCTAAAGTGCAGTGGAAGGTCGATAACGCACTGCAGTCCGGAAA |
| | | TTCTCAGGAGAGTGTGACTGAACAGGACTCAAAAGATAGCACCTATTCC |
| | | CTGTCAAGCACACTGACTCTGAGCAAGGCCGACTACGAGAAGCATAAA |
| | | GTGTATGCTTGTGAAGTCACCCACCAGGGGCTGAGTTCACCAGTCACAA |
| | | AATCATTCAACAGAGGGGAGTGC |
| 146 | 14415 | DIVMTQSQKFMSTSVGDRVSVTCKASQNVGTNVAWYQQKPGQSPKALIYS |
| | | ASYRDSGVPDRFTGSGSGTDFTLTISNVQSEDLAEYLCQQYNSYPLTFGAG |
| | | TKLELKRTVAAPSVFIFPPSDEQLKSGTASVVCLLNNFYPREAKVQWKVDN |
| | | ALQSGNSQESVTEQDSKDSTYSLSSTLTLSKADYEKHKVYACEVTHQGLSS |
| | | PVTKSFNRGEC |
| 147 | 14415 | GACATCGTGATGACCCAGAGCCAGAAGTTTATGAGCACATCCGTGGGC |
| | | GATCGCGTGTCTGTGACCTGCAAGGCCAGCCAGAACGTGGGCACAAAT |
| | | GTGGCCTGGTACCAGCAGAAGCCCGGCCAGTCCCCTAAGGCCCTGATCT |
| | | ACTCTGCCAGCTATCGGGACTCTGGCGTGCCTGATAGATTCACCGGCTC |
| | | CGGCTCTGGCACAGACTTTACCCTGACAATCAGCAACGTGCAGTCCGAG |
| | | GATCTGGCCGAGTACCTGTGCCAGCAGTACAATTCCTATCCCCTGACCT |
| | | TCGGGGCAGGGACAAAGCTGGAGCTGAAGAGGACAGTGGCGGCGCCCA |
| | | GTGTCTTCATTTTTCCCCCTAGCGACGAACAGCTGAAGTCTGGGACAGC |
| | | CAGTGTGGTCTGTCTGCTGAACAACTTCTACCCTAGAGAGGCTAAAGTG |
| | | CAGTGGAAGGTCGATAACGCACTGCAGTCCGGAAATTCTCAGGAGAGT |
| | | GTGACTGAACAGGACTCAAAAGATAGCACCTATTCCCTGTCAAGCACAC |
| | | TGACTCTGAGCAAGGCCGACTACGAGAAGCATAAAGTGTATGCTTGTG |
| | | AAGTCACCCACCAGGGGCTGAGTTCACCAGTCACAAAATCATTCAACA |
| | | GAGGGGAGTGC |
| 148 | 14416 | DIQMTQTTSSLSASLGDRVTISCSASQGISNYLNWYQQKPDGTVKLLIYYTS |
| | | SLHSGVPSRFSGSGSGTDYSLTISNLEPEDIATYYCQQYSDLPWTFGGGTKL |
| | | EIKRTVAAPSVFIFPPSDEQLKSGTASVVCLLNNFYPREAKVQWKVDNALQ |
| | | SGNSQESVTEQDSKDSTYSLSSTLTLSKADYEKHKVYACEVTHQGLSSPVT |
| | | KSFNRGEC |
| 149 | 14416 | GACATCCAGATGACCCAGACCACAAGCTCCCTGTCCGCCTCTCTGGGCG |
| | | ATAGAGTGACAATCAGCTGCTCCGCCTCTCAGGGCATCTCCAACTACCT |
| | | GAATTGGTATCAGCAGAAGCCTGACGGCACCGTGAAGCTGCTGATCTAC |
| | | TATACATCTAGCCTGCACAGCGGAGTGCCATCCAGGTTCAGCGGCTCCG |
| | | GCTCTGGAACCGATTACTCTCTGACAATCAGCAACCTGGAGCCCGAGGA |
| | | CATCGCCACCTACTATTGTCAGCAGTATTCTGATCTGCCTTGGACCTTTG |
| | | GCGGCGGCACAAAGCTGGAGATCAAGCGCACAGTGGCGGCGCCCAGTG |
| | | TCTTCATTTTTCCCCCTAGCGACGAACAGCTGAAGTCTGGGACAGCCAG |
| | | TGTGGTCTGTCTGCTGAACAACTTCTACCCTAGAGAGGCTAAAGTGCAG |
| | | TGGAAGGTCGATAACGCACTGCAGTCCGGAAATTCTCAGGAGAGTGTG |
| | | ACTGAACAGGACTAAAAGATAGCACCTATTCCCTGTCAAGCACACTGA |
| | | CTCTGAGCAAGGCCGACTACGAGAAGCATAAAGTGTATGCTTGTGAAG |
| | | TCACCCACCAGGGGCTGAGTTCACCAGTCACAAAATCATTCAACAGAG |
| | | GGGAGTGC |
| 150 | 18519 | QVQLKESGPGLVAPSQSLSITCTVSGFSLTTYAISWVRQPPGKGLEWLGIIW |
| | | PGGGTNYNSALKSRLSISKDNSRSQVFLKMNSLQTDDTARYYCARGAGTW |
| | | YFDVWGAGTTVTVSSASTKGPSVFPLAPSSKSTSGGTAALGCLVKDYFPEP |
| | | VTVSWNSGALTSGVHTFPAVLQSSGLYSLSSVVTVPSSSLGTQTYICNVNH |
| | | KPSNTKVDKKVEPKSCDKTHTCPPCPAPEAAGGPSVFLFPFKPKDTLMISRT |
| | | PEVTCVVVSVSHEDPEVKFNWYVDGVEVHNAKTKPREEQYNSTYRVVSV |
| | | LTVLHQDWLNGKEYKCKVSNKALPAPIEKTISKAKGQPREPQVYVLPPSRD |
| | | ELTKNQVSLLCLVKGFYPSDIAVEWESNGQPENNYLTWPPVLDSDGSFFLY |
| | | SKLTVDKSRWQQGNVFSCSVMHEALHNHYTQKSLSLSPG |
| 151 | 18519 | CAGGTGCAGCTGAAGGAGTCCGGACCAGGACTGGTGGCCCCCTCTCAG |
| | | AGCCTGTCCATCACCTGCACAGTGAGCGGCTTTTCCCTGACCACATACG |
| | | CAATCTCTTGGGTGCGGCAGCCACCTGGCAAGGGACTGGAGTGGCTGG |
| | | GAATCATCTGGCCAGGAGGAGGCACAAACTATAATTCTGCCCTGAAGA |
| | | GCAGGCTGTCTATCAGCAAGGACAACTCCCGCTCTCAGGTGTTCCTGAA |
| | | GATGAACAGCCTGCAGACCGACGATACAGCAAGGTACTATTGTGCCCG |
| | | GGGGGCAGGGACCTGGTACTTTGACGTGTGGGGGGCAGGGACCACAGT |
| | | GACAGTGAGCTCCGCTAGCACAAAGGGCCCCTCCGTGTTTCCTCTGGCC |
| | | CCATCCTCTAAGTCCACCTCTGGAGGAACAGCCGCCCTGGGCTGTCTGG |
| | | TGAAGGATTACTTCCCTGAGCCAGTGACCGTGTCCTGGAACTCTGGGGC |
| | | CCTGACCAGCGGAGTGCACACATTTCCCGCCGTGCTGCAGAGCTCCGGA |
| | | CTGTACTCCCTGTCTAGCGTGGTGACCGTGCCTTCCTCTAGCCTGGGCAC |
| | | CCAGACATATATCTGCAACGTGAATCACAAGCCTTCCAATACAAAGGTC |
| | | GACAAGAAGGTGGAGCCAAAGTCTTGTGATAAGACCCACACATGCCCA |
| | | CCTTGTCCGGCGCCAGAGGCCGCCGGAGGACCAAGCGTGTTCCTGTTTC |
| | | CACCCAAGCCCAAGGACACCCTGATGATCTCCCGGACCCCAGAGGTGA |
| | | CATGCGTGGTGGTGAGCGTGTCCCACGAGGACCCCGAGGTGAAGTTTA |
| | | ACTGGTACGTGGATGGCGTGGAGGTGCACAATGCCAAGACAAAGCCCC |
| | | GGGAGGAGCAGTACAATTCTACCTATAGAGTGGTGAGCGTGCTGACAG |
| | | TGCTGCACCAGGATTGGCTGAACGGCAAGGAGTATAAGTGTAAGGTGA |
| | | GCAATAAGGCCCTGCCAGCCCCCATCGAGAAGACCATCTCCAAGGCCA |
| | | AGGGCCAGCCTCGCGAACCACAGGTCTACGTGCTGCCCCCTAGCCGCGA |
| | | CGAACTGACTAAAAATCAGGTCTCTCTGCTGTGTCTGGTCAAAGGATTC |
| | | TACCCTTCCGACATCGCCGTGGAGTGGGAAAGTAACGGCCAGCCCGAG |
| | | AACAATTACCTGACCTGGCCCCCTGTGCTGGACTCTGATGGGAGTTTCT |
| | | TTCTGTATTCAAAGCTGACAGTCGATAAAAGCCGGTGGCAGCAGGGCA |
| | | ATGTGTTCAGCTGCTCCGTCATGCACGAAGCACTGCACAACCATTACAC |
| | | TCAGAAGTCCCTGTCCCTGTCACCTGGC |
| 152 | 18520 | QVQLKQSGPGLVQPSQSLSITCTVSGFSLTSYGVHWVRQSPGKGLEWLGVI |
| | | WSGGSTDYNAAFISRLSISKDNSKSQVFFKMNSLQADDTAIYYCARNPLTA |
| | | TVMDYWGQGTSVTVSSASTKGPSVFPLAPSSKSTSGGTAALGCLVKDYFPE |
| | | PVTVSWNSGALTSGVHTFPAVLQSSGLYSLSSVVTVPSSSLGTQTYICNVNH |
| | | KPSNTKVDKKVEPKSCDKTHTCPPCPAPEAAGGPSVFLFPPKPKDTLMISRT |
| | | PEVTCVVVSVSHEDPEVKFNWYVDGVEVHNAKTKPREEQYNSTYRVVSV |
| | | LTVLHQDWLNGKEYKCKVSNKALPAPIEKTISKAKGQPREPQVYVLPPSRD |
| | | ELTKNQVSLLCLVKGFYPSDIAVEWESNGQPENNYLTWPPVLDSDGSFFLY |
| | | SKLTVDKSRWQQGNVFSCSVMHEALHNHYTQKSLSLSPG |
| 153 | 18520 | CAGGTGCAGCTGAAGCAGTCCGGACCAGGACTGGTGCAGCCTTCTCAG |
| | | AGCCTGTCCATCACCTGCACAGTGAGCGGCTTCTCCCTGACCTCTTACG |
| | | GCGTGCACTGGGTGAGGCAGTCTCCTGGCAAGGGACTGGAGTGGCTGG |
| | | GCGTGATCTGGAGCGGAGGCTCCACAGACTATAACGCCGCCTTTATCTC |
| | | TCGCCTGTCTATCAGCAAGGATAACTCCAAGTCTCAGGTGTTCTTTAAG |
| | | ATGAATAGCCTGCAGGCCGACGATACAGCCATCTACTATTGTGCCCGGA |
| | | ATCCCCTGACCGCCACAGTGATGGACTACTGGGGCCAGGGCACCAGCG |
| | | TGACAGTGAGCTCCGCTAGCACAAAGGGCCCCTCCGTGTTTCCTCTGGC |
| | | CCCATCCTCTAAGTCCACCTCTGGAGGAACAGCCGCCCTGGGCTGTCTG |
| | | GTGAAGGATTACTTCCCTGAGCCAGTGACCGTGTCCTGGAACTCTGGGG |
| | | CCCTGACCAGCGGAGTGCACACATTTCCCGCCGTGCTGCAGAGCTCCGG |
| | | ACTGTACTCCCTGTCTAGCGTGGTGACCGTGCCTTCCTCTAGCCTGGGCA |
| | | CCCAGACATATATCTGCAACGTGAATCACAAGCCTTCCAATACAAAGGT |
| | | CGACAAGAAGGTGGAGCCAAAGTCTTGTGATAAGACCCACACATGCCC |
| | | ACCTTGTCCGGCGCCAGAGGCCGCCGGAGGACCAAGCGTGTTCCTGTTT |
| | | CCACCCAAGCCCAAGGACACCCTGATGATCTCCCGGACCCCAGAGGTG |
| | | ACATGCGTGGTGGTGAGCGTGTCCCACGAGGACCCCGAGGTGAAGTTT |
| | | AACTGGTACGTGGATGGCGTGGAGGTGCACAATGCCAAGACAAAGCCC |
| | | CGGGAGGAGCAGTACAATTCTACCTATAGAGTGGTGAGCGTGCTGACA |
| | | GTGCTGCACCAGGATTGGCTGAACGGCAAGGAGTATAAGTGTAAGGTG |
| | | AGCAATAAGGCCCTGCCAGCCCCCATCGAGAAGACCATCTCCAAGGCC |
| | | AAGGGCCAGCCTCGCGAACCACAGGTCTACGTGCTGCCCCCTAGCCGCG |
| | | ACGAACTGACTAAAAATCAGGTCTCTCTGCTGTGTCTGGTCAAAGGATT |
| | | CTACCCTTCCGACATCGCCGTGGAGTGGGAAAGTAACGGCCAGCCCGA |
| | | GAACAATTACCTGACCTGGCCCCCTGTGCTGGACTCTGATGGGAGTTTC |
| | | TTTCTGTATTCAAAGCTGACAGTCGATAAAAGCCGGTGGCAGCAGGGCA |
| | | ATGTGTTCAGCTGCTCCGTCATGCACGAAGCACTGCACAACCATTACAC |
| | | TCAGAAGTCCCTGTCCCTGTCACCTGGC |
| 154 | 18521 | QVQLKESGPGLVAPSQSLSITCTVSGFSLTSYAINWVRQPPGKGLEWLGVL |
| | | WPGGGTNYNSALKSRLSISKDNSKSQVFLKMNSLQTDDTARYYCARGSGT |
| | | WYFDVWGAGTTVTVSSASTKGPSVFPLAPSSKSTSGGTAALGCLVKDYFPE |
| | | PVTVSWNSGALTSGVHTFPAVLQSSGLYSLSSVVTVPSSSLGTQTYICNVNH |
| | | KPSNTKVDKKVEPKSCDKTHTCPPCPAPEAAGGPSVFLFPPKPKDTLMISRT |
| | | PEVTCVVVSVSHEDPEVKFNWYVDGVEVHNAKTKPREEQYNSTYRVVSV |
| | | LTVLHQDWLNGKEYKCKVSNKALPAPIEKTISKAKGQPREPQVYVLPPSRD |
| | | ELTKNQVSLLCLVKGFYPSDIAVEWESNGQPENNYLTWPPVLDSDGSFFLY |
| | | SKLTVDKSRWQQGNVFSCSVMHEALHNHYTQKSLSLSPG |
| 155 | 18521 | CAGGTGCAGCTGAAGGAGAGCGGACCAGGACTGGTGGCCCCCTCTCAG |
| | | AGCCTGTCCATCACCTGCACAGTGAGCGGCTTTTCCCTGACCTCYTACGC |
| | | CATCAACTGGGTGCGGCAGCCACCTGGCAAGGGACTGGAGTGGCTGGG |
| | | CGTGCTGTGGCCAGGAGGAGGCACAAACTATAATAGCGCCCTGAAGTC |
| | | CAGGCTGTCTATCAGCAAGGACAACTCCAAGTCTCAGGTGTTCCTGAAG |
| | | ATGAACAGCCTGCAGACCGACGATACAGCCCGGTACTATTGTGCCAGA |
| | | GGCTCCGGCACCTGGTACTTTGACGTGTGGGGGGCAGGGACCACAGTG |
| | | ACAGTGAGCTCCGCTAGCACAAAGGGCCCCTCCGTGTTTCCTCTGGCCC |
| | | CATCCTCTAAGTCCACCTCTGGAGGAACAGCCGCCCTGGGCTGTCTGGT |
| | | GAAGGATTACTTCCCTGAGCCAGTGACCGTGTCCTGGAACTCTGGGGCC |
| | | CTGACCAGCGGAGTGCACACATTTCCCGCCGTGCTGCAGAGCTCCGGAC |
| | | TGTACTCCCTGTCTAGCGTGGTGACCGTGCCTTCCTCTAGCCTGGGCACC |
| | | CAGACATATATCTGCAACGTGAATCACAAGCCTTCCAATACAAAGGTCG |
| | | ACAAGAAGGTGGAGCCAAAGTCTTGTGATAAGACCCACACATGCCCAC |
| | | CTTGTCCGGCGCCAGAGGCCGCCGGAGGACCAAGCGTGTTCCTGTTTCC |
| | | ACCCAAGCCCAAGGACACCCTGATGATCTCCCGGACCCCAGAGGTGAC |
| | | ATGCGTGGTGGTGAGCGTGTCCCACGAGGACCCCGAGGTGAAGTTTAA |
| | | CTGGTACGTGGATGGCGTGGAGGTGCACAATGCCAAGACAAAGCCCCG |
| | | GGAGGAGCAGTACAATTCTACCTATAGAGTGGTGAGCGTGCTGACAGT |
| | | GCTGCACCAGGATTGGCTGAACGGCAAGGAGTATAAGTGTAAGGTGAG |
| | | CAATAAGGCCCTGCCAGCCCCCATCGAGAAGACCATCTCCAAGGCCAA |
| | | GGGCCAGCCTCGCGAACCACAGGTCTACGTGCTGCCCCCTAGCCGCGAC |
| | | GAACTGACTAAAAATCAGGTCTCTCTGCTGTGTCTGGTCAAAGGATTCT |
| | | ACCCTTCCGACATCGCCGTGGAGTGGGAAAGTAACGGCCAGCCCGAGA |
| | | ACAATTACCTGACCTGGCCCCCTGTGCTGGACTCTGATGGGAGTTTCTTT |
| | | CTGTATTCAAAGCTGACAGTCGATAAAAGCCGGTGGCAGCAGGGCAAT |
| | | GTGTTCAGCTGCTCCGTCATGCACGAAGCACTGCACAACCATTACACTC |
| | | AGAAGTCCCTGTCCCTGTCACCTGGC |
| 156 | 18522 | QVQLQESGPGLVQPTQSLSITCTVSGFSLISYGVHWVRQSPGKGLEWLGVI |
| | | WSGGSTDYNAAFISRLSISKDNSKSQVFFKMNSLQADDTAIYYCARNPLTA |
| | | TVMDYWGQGTSVTVSSASTKGPSVFPLAPSSKSTSGGTAALGCLVKDYFPE |
| | | PVTVSWNSGALTSGVHTFPAVLQSSGLYSLSSVVTVPSSSLGTQTYICNVNH |
| | | KPSNTKVDKKVEPKSCDKTHTCPPCPAPEAAGGPSVFLFPPKPKDTLMISRT |
| | | PEVTCVVVSVSHEDPEVKFNWYVDGVEVHNAKTKPREEQYNSTYRVVSV |
| | | LTVLHQDWLNGKEYKCKVSNKALPAPIEKTISKAKGQPREPQVYVLPPSRD |
| | | ELTKNQVSLLCLVKGFYPSDIAVEWESNGQPENNYLTWPPVLDSDGSFFLY |
| | | SKLTVDKSRWQQGNVFSCSVMHEALHNHYTQKSLSLSPG |
| 157 | 18522 | CAGGTGCAGCTGCAGGAGAGCGGACCAGGACTGGTGCAGCCTACACAG |
| | | TCTCTGAGCATCACCTGCACAGTGTCTGGCTTCAGCCTGATCTCCTACGG |
| | | AGTGCACTGGGTGAGGCAGTCCCCTGGCAAGGGACTGGAGTGGCTGGG |
| | | CGTGATCTGGTCTGGCGGCAGCACCGACTATAACGCCGCCTTTATCTCC |
| | | CGCCTGTCCATCTCTAAGGATAACAGCAAGTCCCAGGTGTTCTTTAAGA |
| | | TGAACAGCCTGCAGGCCGACGATACAGCCATCTACTATTGTGCCCGGAA |
| | | TCCCCTGACCGCCACAGTGATGGACTACTGGGGCCAGGGCACCTCTGTG |
| | | ACAGTGAGCTCCGCTAGCACAAAGGGCCCCTCCGTGTTTCCTCTGGCCC |
| | | CATCCTCTAAGTCCACCTCTGGAGGAACAGCCGCCCTGGGCTGTCTGGT |
| | | GAAGGATTACTTCCCTGAGCCAGTGACCGTGTCCTGGAACTCTGGGGCC |
| | | CTGACCACCGGAGTGCACACATTTCCCGCCGTGCTGCAGAGCTCCGGAC |
| | | TGTACTCCCTGTCTAGCGTGGTGACCGTGCCTTCCTCTAGCCTGGGCACC |
| | | CAGACATATATCTGCAACGTGAATCACAAGCCTTCCAATACAAAGGTCG |
| | | ACAAGAAGGTGGAGCCAAAGTCTTGTGATAAGACCCACACATGCCCAC |
| | | CTTGTCCGGCGCCAGAGGCCGCCGGAGGACCAAGCGTGTTCCTGTTTCC |
| | | ACCCAAGCCCAAGGACACCCTGATGATCTCCCGGACCCCAGAGGTGAC |
| | | ATGCGTGGTGGTGAGCGTGTCCCACGAGGACCCCGAGGTGAAGTTTAA |
| | | CTGGTACGTGGATGGCGTGGAGGTGCACAATGCCAAGACAAAGCCCCG |
| | | GGAGGAGCAGTACAATTCTACCTATAGAGTGGTGAGCGTGCTGACAGT |
| | | GCTGCACCAGGATTGGCTGAACGGCAAGGAGTATAAGTGTAAGGTGAG |
| | | CAATAAGGCCCTGCCAGCCCCCATCGAGAAGACCATCTCCAAGGCCAA |
| | | GGGCCAGCCTCGCGAACCACAGGTCTACGTGCTGCCCCCTAGCCGCGAC |
| | | GAACTGACTAAAAATCAGGTCTCTCTGCTGTGTCTGGTCAAAGGATTCT |
| | | ACCCTTCCGACATCGCCGTGGAGTGGGAAAGTAACGGCCAGCCCGAGA |
| | | ACAATTACCTGACCTGGCCCCCTGTGCTGGACTCTGATGGGAGTTTCTTT |
| | | CTGTATTCAAAGCTGACAGTCGATAAAAGCCGGTGGCAGCAGGGCAAT |
| | | GTGTTCAGCTGCTCCGTCATGCACGAAGCACTGCACAACCATTACACTC |
| | | AGAAGTCCCTGTCCCTGTCACCTGGC |
| 158 | 18523 | QVQLKESGPGLVAPSQSLSITCTVSGFSLTSYAISWVRQPPGKGLEWLGVIW |
| | | PGGGTNYNSALKSRLSISKDNSKSQVFLKMNSLQTDDTARYYCARGTGTW |
| | | YFDVWGAGTTVTVSSASTKGPSVFPLAPSSKSTSGGTAALGCLVKDYFPEP |
| | | VTVSWNSGALTSGVHTFPAVLQSSGLYSLSSVVTVPSSSLGTQTYICNVNH |
| | | KPSNTKVDKKVEPKSCDKTHTCPPCPAPEAAGGPSVFLFPPKPKDTLMISRT |
| | | PEVTCVVVSVSHEDPEVKFNWYVDGVEVHNAKTKPREEQYNSTYRVVSV |
| | | LTVLHQDWLNGKEYKCKVSNKALPAPIEKTISKAKGQPREPQVYVLPPSRD |
| | | ELTKNQVSLLCLVKGFYPSDIAVEWESNGQPENNYLTWPPVLDSDGSFFLY |
| | | SKLTVDKSRWQQGNVFSCSVMHEALHNHYTQKSLSLSPG |
| 159 | 18523 | CAGGTGCAGCTGAAGGAGTCTGGACCAGGACTGGTGGCCCCCTCTCAG |
| | | AGCCTGTCCATCACCTGCACAGTGAGCGGCTTTTCCCTGACCTCTTACGC |
| | | AATCTCCTGGGTGCGGCAGCCACCTGGCAAGGGACTGGAGTGGCTGGG |
| | | CGTGATCTGGCCAGGAGGAGGCACAAACTATAATAGCGCCCTGAAGTC |
| | | CAGGCTGTCTATCAGCAAGGACAACTCCAAGTCTCAGGTGTTCCTGAAG |
| | | ATGAATAGCCTGCAGACCGACGATACAGCCCGGTACTATTGTGCCAGA |
| | | GGCACCGGCACATGGTACTTTGACGTGTGGGGGGCAGGGACCACAGTG |
| | | ACAGTGAGCTCCGCTAGCACAAAGGGCCCCTCCGTGTTTCCTCTGGCCC |
| | | CATCCTCTAAGTCCACCTCTGGAGGAACAGCCGCCCTGGGCTGTCTGGT |
| | | GAAGGATTACTTCCCTGAGCCAGTGACCGTGTCCTGGAACTCTGGGGCC |
| | | CTGACCAGCGGAGTGCACACATTTCCCGCCGTGCTGCAGAGCTCCGGAC |
| | | TGTACTCCCTGTCTAGCGTGGTGACCGTGCCTTCCTCTAGCCTGGGCACC |
| | | CAGACATATATCTGCAACGTGAATCACAAGCCTTCCAATACAAAGGTCG |
| | | ACAAGAAGGTGGAGCCAAAGTCTTGTGATAAGACCCACACATGCCCAC |
| | | CTTGTCCGGCGCCAGAGGCCGCCGGAGGACCAAGCGTGTTCCTGTTTCC |
| | | ACCCAAGCCCAAGGACACCCTGATGATCTCCCGGACCCCAGAGGTGAC |
| | | ATGCGTGGTGGTGAGCGTGTCCCACGAGGACCCCGAGGTGAAGTTTAA |
| | | CTGGTACGTGGATGGCGTGGAGGTGCACAATGCCAAGACAAAGCCCCG |
| | | GGAGGAGCAGTACAATTCTACCTATAGAGTGGTGAGCGTGCTGACAGT |
| | | GCTGCACCAGGATTGGCTGAACGGCAAGGAGTATAAGTGTAAGGTGAG |
| | | CAATAAGGCCCTGCCAGCCCCCATCGAGAAGACCATCTCCAAGGCCAA |
| | | GGGCCAGCCTCGCGAACCACAGGTCTACGTGCTGCCCCCTAGCCGCGAC |
| | | GAACTGACTAAAAATCAGGTCTCTCTGCTGTGTCTGGTCAAAGGATTCT |
| | | ACCCTTCCGACATCGCCGTGGAGTGGGAAAGTAACGGCCAGCCCGAGA |
| | | ACAATTACCTGACCTGGCCCCCTGTGCTGGACTCTGATGGGAGTTTCTTT |
| | | CTGTATTCAAAGCTGACAGTCGATAAAAGCCGGTGGCAGCAGGGCAAT |
| | | GTGTTCAGCTGCTCCGTCATGCACGAAGCACTGCACAACCATTACACTC |
| | | AGAAGTCCCTGTCCCTGTCACCTGGC |
| 160 | 18524 | QVQLKESGPGLVAPSQSLSITCTVSGFSLTTYAISWVRQPPGKGLEWLGIIW |
| | | PGGGTNYNSALKSRLSISKDNSRSQVFLKMNSLQTDDTARYYCARGAGTW |
| | | YFDVWGAGTTVTVSSASTKGPSVFPLAPSSKSTSGGTAALGCLVKDYFPEP |
| | | VTVSWNSGALTSGVHTFPAVLQSSGLYSLSSVVTVPSSSLGTQTYICNVNH |
| | | KPSNTKVDKKVEPKSCDKTHTCPPCPAPEAAGGPSVFLFPPKPKDTLMISRT |
| | | PEVTCVVVSVSHEDPEVKFNWYVDGVEVHNAKTKPREEQYNSTYRVVSV |
| | | LTVLHQDWLNGKEYKCKVSNKALPAPIEKTISKAKGQPREPQVYVYPPSRD |
| | | ELTKNQVSLTCLVKGFYPSDIAVEWESNGQPENNYKTTPPVLDSDGSFALV |
| | | SKLTVDKSRWQQGNVFSCSVMHEALHNHYTQKSLSLSPGGGGGQVQLVQ |
| | | SGAEVVKPGASVKISCKASGYTFTGYFMNWVKQSPGQSLEWIGRIHPYDG |
| | | DTFYNQKFQGKATLTVDKSSNTAHMELLSLTSEDFAVYYCTRYDGSRAMD |
| | | YWGQGTTVTVSSGGGGSGGGGSGGGGSDIVLTQSPLSLAVSLGQPAIISCK |
| | | ASQSVSFAGTSLMHWYHQKPGQQPRLLIYRASNLEAGVPDRFSGSGSKTDF |
| | | TLTISPVEAEDAATYYCQQSREYPYTFGGGTKLEIK |
| 161 | 18524 | CAGGTGCAGCTGAAGGAGTCCGGACCAGGACTGGTGGCCCCCTCTCAG |
| | | AGCCTGTCCATCACCTGCACAGTGAGCGGCTTTTCCCTGACCACATACG |
| | | CAATCTCTTGGGTGCGGCAGCCACCTGGCAAGGGACTGGAGTGGCTGG |
| | | GAATCATCTGGCCAGGAGGAGGCACAAACTATAATTCTGCCCTGAAGA |
| | | GCAGGCTGTCTATCAGCAAGGACAACTCCCGCTCTCAGGTGTTCCTGAA |
| | | GATGAACAGCCTGCAGACCGACGATACAGCAAGGTACTATTGTGCCCG |
| | | GGGGGCAGGGACCTGGTACTTTGACGTGTGGGGGGCAGGGACCACAGT |
| | | GACAGTGAGCTCCGCTAGCACAAAGGGCCCAAGCGTGTTTCCTCTGGCC |
| | | CCATCCTCTAAGAGCACCTCCGGAGGAACAGCCGCCCTGGGCTGTCTGG |
| | | TGAAGGACTACTTCCCTGAGCCAGTGACCGTGTCCTGGAACTCTGGGGC |
| | | CCTGACCAGCGGAGTGCACACATTTCCCGCCGTGCTGCAGAGCTCCGGA |
| | | CTGTACTCCCTGTCTAGCGTGGTGACCGTGCCTTCCTCTAGCCTGGGCAC |
| | | CCAGACATATATCTGCAACGTGAATCACAAGCCTTCTAATACAAAGGTC |
| | | GACAAGAAGGTGGAGCCAAAGAGCTGTGATAAGACCCACACATGCCCA |
| | | CCTTGTCCGGCGCCAGAGGCCGCCGGAGGACCAAGCGTGTTCCTGTTTC |
| | | CACCCAAGCCCAAGGACACCCTGATGATCTCCAGGACCCCTGAGGTGA |
| | | CATGCGTGGTGGTGTCTGTGAGCCACGAGGACCCAGAGGTGAAGTTCA |
| | | ACTGGTACGTGGATGGCGTGGAGGTGCACAATGCCAAGACAAAGCCCA |
| | | GAGAGGAGCAGTACAATTCCACCTATCGCGTGGTGTCTGTGCTGACAGT |
| | | GCTGCACCAGGATTGGCTGAACGGCAAGGAGTATAAGTGCAAGGTGTC |
| | | CAATAAGGCCCTGCCAGCCCCCATCGAGAAGACCATCTCTAAGGCCAA |
| | | GGGCCAGCCTCGCGAACCTCAGGTGTACGTGTATCCTCCAAGCAGAGAC |
| | | GAGCTGACCAAGAACCAGGTGTCCCTGACATGTCTGGTGAAGGGCTTTT |
| | | ACCCCTCTGATATCGCCGTGGAGTGGGAGAGCAATGGCCAGCCTGAGA |
| | | ACAATTATAAGACCACACCCCCTGTGCTGGACAGCGATGGCTCCTTCGC |
| | | CCTGGTGAGCAAGCTGACCGTGGACAAGTCCAGGTGGCAGCAGGGCAA |
| | | CGTGTTTTCCTGCTCTGTGATGCACGAGGCCCTGCACAATCACTACACA |
| | | CAGAAGAGCCTGAGCTTAAGCCCAGGAGGAGGAGGAGGACAGGTGCA |
| | | GCTGGTGCAGAGCGGAGCCGAGGTGGTGAAGCCTGGGGCCAGCGTGAA |
| | | GATCAGCTGCAAGGCCTCCGGCTACACCTTCACAGGCTACTTCATGAAC |
| | | TGGGTGAAGCAGTCTCCTGGCCAGAGCCTGGAGTGGATCGGCAGAATC |
| | | CACCCATACGACGGCGATACCTTCTATAACCAGAAGTTTCAGGGCAAGG |
| | | CCACCCTGACAGTGGACAAGAGCTCCAATACCGCCCACATGGAGCTGCT |
| | | GTCCCTGACATCTGAGGATTTCGCCGTGTACTATTGCACCCGGTACGAC |
| | | GGCTCCAGAGCCATGGATTATTGGGGCCAGGGCACCACAGTGACAGTG |
| | | TCTAGCGGAGGAGGAGGCTCCGGAGGAGGAGGCTCTGGCGGCGGCGGC |
| | | AGCGACATCGTGCTGACCCAGAGCCCACTGTCCCTGGCCGTGTCCCTGG |
| | | GCCAGCCCGCCATCATCTCTTGTAAGGCCTCCCAGAGCGTGAGCTTCGC |
| | | CGGGACCAGCCTGATGCACTGGTACCACCAGAAGCCCGGCCAGCAGCC |
| | | CAGACTGCTGATCTATAGGGCCTCCAATCTGGAGGCCGGAGTGCCAGAC |
| | | CGGTTCTCCGGCTCTGGCAGCAAGACCGACTTCACCCTGACAATCAGCC |
| | | CTGTGGAGGCAGAGGATGCAGCAACATACTATTGTCAGCAGTCCAGGG |
| | | AGTACCCATATACCTTTGGCGGCGGCACAAAGCTGGAGATCAAG |
| 162 | 18552 | QVQLKESGPGLVAPSQSLSITCTVSGFSLTTYAISWVRQPPGKGLEWLGIIW |
| | | PGGGTNYNSALKSRLSISKDNSRSQVFLKMNSLQTDDTARYYCARGAGTW |
| | | YFDVWGAGTTVTVSSASTKGPSVFPLAPSSKSTSGGTAALGCLVKDYFPEP |
| | | VTVSWNSGALTSGVHTFPAVLQSSGLYSLSSVVTVPSSSLGTQTYICNVNH |
| | | KPSNTKVDKKVEPKSCDKTHTCPPCPAPEAAGGPSVFLFPPKPKDTLMISRT |
| | | PEVTCVVVSVSHEDPEVKFNWYVDGVEVHNAKTKPREEQYNSTYRVVSV |
| | | LTVLHQDWLNGKEYKCKVSNKALPAPIEKTISKAKGQPREPQVYVYPPSRD |
| | | ELTKNQVSLTCLVKGFYPSDIAVEWESNGQPENNYKTTPPVLDSDGSFALV |
| | | SKLTVDKSRWQQGNVFSCSVMHEALHNHYTQKSLSLSPGGGGGDIVMTQ |
| | | TPASVEAAVGGTVTIKCQASQSIYSSLAWYQQKPGQSPKLLIYDASHLASG |
| | | VPSRFSGSRYGTEFTLTISGVQCDDAATYYCQGGWYSSAATYVPNTFGGGT |
| | | EVVVKGGGGSGGGGSGGGGSQEQLVESGGGLVQPEGSLTLTCKASGFTIS |
| | | NNYYMCWVRQAPGKGLEWIACIYGGISGRTYYASWAKGRFTISKTSSTTV |
| | | TLQMTSLTAADTATYFCVRGYVGTSNLWGPGTLVTVSS |
| 163 | 18552 | CAGGTGCAGCTGAAGGAGTCCGGACCAGGACTGGTGGCCCCCTCTCAG |
| | | AGCCTGTCCATCACCTGCACAGTGAGCGGCTTTTCCCTGACCACATACG |
| | | CAATCTCTTGGGTGCGGCAGCCACCTGGCAAGGGACTGGAGTGGCTGG |
| | | GAATCATCTGGCCAGGAGGAGGCACAAACTATAATTCTGCCCTGAAGA |
| | | GCAGGCTGTCTATCAGCAAGGACAACTCCCGCTCTCAGGTGTTCCTGAA |
| | | GATGAACAGCCTGCAGACCGACGATACAGCAAGGTACTATTGTGCCCG |
| | | GGGGGCAGGGACCTGGTACTTTGACGTGTGGGGGGCAGGGACCACAGT |
| | | GACAGTGAGCTCCGCTAGCACAAAGGGCCCCTCCGTGTTTCCTCTGGCC |
| | | CCATCCTCTAAGTCCACCTCTGGAGGAACAGCCGCCCTGGGCTGTCTGG |
| | | TGAAGGATTACTTCCCTGAGCCAGTGACCGTGTCCTGGAACTCTGGGGC |
| | | CCTGACCAGCGGAGTGCACACATTTCCCGCCGTGCTGCAGAGCTCCGGA |
| | | CTGTACTCCCTGTCTAGCGTGGTGACCGTGCCTTCCTCTAGCCTGGGCAC |
| | | CCAGACATATATCTGCAACGTGAATCACAAGCCTTCCAATACAAAGGTC |
| | | GACAAGAAGGTGGAGCCAAAGTCTTGTGATAAGACCCACACATGCCCA |
| | | CCTTGTCCGGCGCCAGAGGCCGCCGGAGGACCAAGCGTGTTCCTGTTTC |
| | | CACCCAAGCCCAAGGACACCCTGATGATCTCCCGGACCCCAGAGGTGA |
| | | CATGCGTGGTGGTGAGCGTGTCCCACGAGGACCCCGAGGTGAAGTTTA |
| | | ACTGGTACGTGGATGGCGTGGAGGTGCACAATGCCAAGACAAAGCCCC |
| | | GGGAGGAGCAGTACAATTCTACCTATAGAGTGGTGAGCGTGCTGACAG |
| | | TGCTGCACCAGGATTGGCTGAACGGCAAGGAGTATAAGTGTAAGGTGA |
| | | GCAATAAGGCCCTGCCAGCCCCCATCGAGAAGACCATCTCCAAGGCCA |
| | | AGGGCCAGCCTCGCGAGCCACAGGTGTACGTGTATCCCCCTAGCAGGG |
| | | ACGAGCTGACAAAGAACCAGGTGTCCCTGACCTGCCTGGTGAAGGGCT |
| | | TCTACCCCTCCGATATCGCCGTGGAGTGGGAGTCTAATGGCCAGCCTGA |
| | | GAACAATTATAAGACCACACCACCCGTGCTGGACTCTGATGGCAGCTTC |
| | | GCCCTGGTGAGCAAGCTGACAGTGGACAAGTCCAGATGGCAGCAGGGC |
| | | AACGTGTTTTCTTGCAGCGTGATGCACGAGGCCCTGCACAATCACTACA |
| | | CCCAGAAGTCCCTGTCTCTGAGCCCAGGAGGAGGAGGAGGCGATATCG |
| | | TGATGACCCAGACACCCGCCTCCGTGGAGGCCGCCGTGGGAGGAACCG |
| | | TGACAATCAAGTGTCAGGCCTCCCAGTCTATCTACAGCTCCCTGGCCTG |
| | | GTATCAGCAGAAGCCTGGCCAGAGCCCAAAGCTGCTGATCTACGACGC |
| | | CTCCCACCTGGCCTCTGGAGTGCCAAGCCGGTTCAGCGGCTCCAGATAT |
| | | GGCACAGAGTTTACCCTGACAATCTCCGGAGTGCAGTGCGACGATGCA |
| | | GCAACCTACTATTGTCAGGGAGGATGGTACTCTAGCGCCGCCACCTATG |
| | | TGCCTAACACATTCGGCGGCGGCACCGAGGTGGTGGTGAAGGGAGGAG |
| | | GAGGCTCCGGCGGAGGAGGCTCTGGCGGCGGCGGCAGCCAGGAGCAGC |
| | | TGGTGGAGTCTGGAGGAGGACTGGTGCAGCCTGAGGGCAGCCTGACCC |
| | | TGACATGCAAGGCCTCCGGCTTTACCATCTCTAACAATTACTATATGTG |
| | | CTGGGTGCGGCAGGCCCCAGGCAAGGGACTGGAGTGGATCGCCTGCAT |
| | | CTACGGCGGCATCTCTGGCAGGACATACTATGCCAGCTGGGCCAAGGG |
| | | CCGCTTCACCATCTCCAAGACATCCTCTACCACAGTGACCCTGCAGATG |
| | | ACCTCTCTGACAGCCGCCGATACCGCCACATACTTTTGCGTGCGGGGCT |
| | | ATGTGGGCACCAGCAATCTGTGGGGCCCTGGCACCCTGGTGACAGTGA |
| | | GCTCC |
| 164 | 18553 | QVQLKQSGPGLVQPSQSLSITCTVSGFSLTSYGVHWVRQSPGKGLEWLGVI |
| | | WSGGSTDYNAAFISRLSISKDNSKSQVFFKMNSLQADDTAIYYCARNPLTA |
| | | TVMDYWGQGTSVTVSSASTKGPSVFPLAPSSKSTSGGTAALGCLVKDYFPE |
| | | PVTVSWNSGALTSGVHTFPAVLQSSGLYSLSSVVTVPSSSLGTQTYICNVNH |
| | | KPSNTKVDKKVEPKSCDKTHTCPPCPAPEAAGGPSVFLFPPKPKDTLMISRT |
| | | PEVTCVVVSVSHEDPEVKFNWYVDGVEVHNAKTKPREEQYNSTYRVVSV |
| | | LTVLHQDWLNGKEYKCKVSNKALPAPIEKTISKAKGQPREPQVYVYPPSRD |
| | | ELTKNQVSLTCLVKGFYPSDIAVEWESNGQPENNYKTTPPVLDSDGSFALV |
| | | SKLTYDKSRWQQGNVFSCSVMHEALHNHYTQKSLSLSPGGGGGDIVMTQ |
| | | TPASVEAAVGGTVTIKCQASQSIYSSLAWYQQKPGQSPKLLIYDASHLASG |
| | | VPSRFSGSRYGTEFTLTISGVQCDDAATYYCQGGWYSSAATYVPNTFGGGT |
| | | EVVVKGGGGSGGGGSGGGGSQEQLVESGGGLVQPEGSLTLTCKASGFTIS |
| | | NNYYMCWVRQAPGKGLEWIACIYGGISGRTYYASWAKGRFTISKTSSTTV |
| | | TLQMTSLTAADTATYFCVRGYVGTSNLWGPGTLVTVSS |
| 165 | 18553 | CAGGTGCAGCTGAAGCAGTCCGGACCAGGACTGGTGCAGCCTTCTCAG |
| | | AGCCTGTCCATCACCTGCACAGTGAGCGGCTTCTCCCTGACCTCTTACG |
| | | GCGTGCACTGGGTGAGGCAGTCTCCTGGCAAGGGACTGGAGTGGCTGG |
| | | GCGTGATCTGGAGCGGAGGCTCCACAGACTATAACGCCGCCTTTATCTC |
| | | TCGCCTGTCTATCAGCAAGGATAACTCCAAGTCTCAGGTGTTCTTTAAG |
| | | ATGAATAGCCTGCAGGCCGACGATACAGCCATCTACTATTGTGCCCGGA |
| | | ATCCCCTGACCGCCACAGTGATGGACTACTGGGGCCAGGGCACCAGCG |
| | | TGACAGTGAGCTCCGCTAGCACAAAGGGCCCCTCCGTGTTTCCTCTGGC |
| | | CCCATCCTCTAAGTCCACCTCTGGAGGAACAGCCGCCCTGGGCTGTCTG |
| | | GTGAAGGATTACTTCCCTGAGCCAGTGACCGTGTCCTGGAACTCTGGGG |
| | | CCCTGACCAGCGGAGTGCACACATTTCCCGCCGTGCTGCAGAGCTCCGG |
| | | ACTGTACTCCCTGTCTAGCGTGGTGACCGTGCCTTCCTCTAGCCTGGGCA |
| | | CCCAGACATATATCTGCAACGTGAATCACAAGCCTTCCAATACAAAGGT |
| | | CGACAAGAAGGTGGAGCCAAAGTCTTGTGATAAGACCCACACATGCCC |
| | | ACCTTGTCCGGCGCCAGAGGCCGCCGGAGGACCAAGCGTGTTCCTGTTT |
| | | CCACCCAAGCCCAAGGACACCCTGATGATCTCCCGGACCCCAGAGGTG |
| | | ACATGCGTGGTGGTGAGCGTGTCCCACGAGGACCCCGAGGTGAAGTTT |
| | | AACTGGTACGTGGATGGCGTGGAGGTGCACAATGCCAAGACAAAGCCC |
| | | CGGGAGGAGCAGTACAATTCTACCTATAGAGTGGTGAGCGTGCTGACA |
| | | GTGCTGCACCAGGATTGGCTGAACGGCAAGGAGTATAAGTGTAAGGTG |
| | | ACTCAATAAGGCCCTGCCAGCCCCCATCGAGAAGACCATCTCCAAGGCC |
| | | AAGGGCCAGCCTCGCGAGCCACAGGTGTACGTGTATCCCCCTAGCAGG |
| | | GACGAGCTGACAAAGAACCAGGTGTCCCTGACCTGCCTGGTGAAGGGC |
| | | TTCTACCCCTCCGATATCGCCGTGGAGTGGGAGTCTAATGGCCAGCCTG |
| | | AGAACAATTATAAGACCACACCACCCGTGCTGGACTCTGATGGCAGCTT |
| | | CGCCCTGGTGAGCAAGCTGACAGTGGACAAGTCCAGATGGCAGCAGGG |
| | | CAACGTGTTTTCTTGCAGCGTGATGCACGAGGCCCTGCACAATCACTAC |
| | | ACCCAGAAGTCCCTGTCTCTGAGCCCAGGAGGAGGAGGAGGCGATATC |
| | | GTGATGACCCAGACACCCGCCTCCGTGGAGGCCGCCGTGGGAGGAACC |
| | | GTGACAATCAAGTGTCAGGCCTCCCAGTCTATCTACAGCTCCCTGGCCT |
| | | GGTATCAGCAGAAGCCTGGCCAGAGCCCAAAGCTGCTGATCTACGACG |
| | | CCTCCCACCTGGCCTCTGGAGTGCCAAGCCGGTTCAGCGGCTCCAGATA |
| | | TGGCACAGAGTTTACCCTGACAATCTCCGGAGTGCAGTGCGACGATGCA |
| | | GCAACCTACTATTGTCAGGGAGGATGGTACTCTAGCGCCGCCACCTATG |
| | | TGCCTAACACATTCGGCGGCGGCACCGAGGTGGTGGTGAAGGGAGGAG |
| | | GAGGCTCCGGCGGAGGAGGCTCTGGCGGCGGCGGCAGCCAGGAGCAGC |
| | | TGGTGGAGTCTGGAGGAGGACTGGTGCAGCCTGAGGGCAGCCTGACCC |
| | | TGACATGCAAGGCCTCCGGCTTTACCATCTCTAACAATTACTATATGTG |
| | | CTGGGTGCGGCAGGCCCCAGGCAAGGGACTGGAGTGGATCGCCTGCAT |
| | | CTACGGCGGCATCTCTGGCAGGACATACTATGCCAGCTGGGCCAAGGG |
| | | CCGCTTCACCATCTCCAAGACATCCTCTACCACAGTGACCCTGCAGATG |
| | | ACCTCTCTGACAGCCGCCGATACCGCCACATACTTTTGCGTGCGGGGCT |
| | | ATGTGGGCACCAGCAATCTGTGGGGCCCTGGCACCCTGGTGACAGTGA |
| | | GCTCC |
| 166 | 18554 | QVQLKESGPGLVAPSQSLSITCTVSGFSLTSYAINWVRQPPGKGLEWLGVL |
| | | WPGGGYNYNSALKSRLSISKDNSKSQVFLKMNSLQTDDTARYYCARGSGT |
| | | WYFDVWGAGTTVTVSSASTKGPSVFPLAPSSKSTSGGTAALGCLVKDYFPE |
| | | PVTVSWNSGALTSGVHTFPAVLQSSGLYSLSSVVTVPSSSLGTQTYICNVNH |
| | | KPSNTKVDKKVEPKSCDKTHTCPPCPAPEAAGGPSVFLFPPKPKDTLMISRT |
| | | PEVTCVVVSVSHEDPEVKFNWYVDGVEVHNAKTKPREEQYNSTYRVVSV |
| | | LTVLHQDWLNGKEYKCKVSNKALPAPIEKTISKAKGQPREPQVYVYPPSRD |
| | | ELTKNQVSLTCLVKGFYPSDIAVEWESNGQPENNYKTTPPVLDSDGSFALV |
| | | SKLTVDKSRWQQGNVFSCSVMHEALHNHYTQKSLSLSPGGGGGDIVMTQ |
| | | TPASVEAAVGGTVTIKCQASQSIYSSLAWYQQKPGQSPKLLIYDASHLASG |
| | | VPSRFSGSRYGTEFTLTISGVQCDDAATYYCQGGWYSSAATYVPNTFGGGT |
| | | EVVVKGGGGSGGGGSGGGGSQEQLVESGGGLVQPEGSLTLTCKASGFTIS |
| | | NNYYMCWVRQAPGKGLEWIACIYGGISGRTYYASWAKGRFTISKTSSTTV |
| | | TLQMTSLTAADTATYFCVRGYVGTSNLWGPGTLVTVSS |
| 167 | 18554 | CAGGTGCAGCTGAAGGAGAGCGGACCAGGACTGGTGGCCCCCTCTCAG |
| | | AGCCTGTCCATCACCTGCACAGTGAGCGGCTTTTCCCTGACCTCTTACGC |
| | | CATCAACTGGGTGCGGCAGCCACCTGGCAAGGGACTGGAGTGGCTGGG |
| | | CGTGCTGTGGCCAGGAGGAGGCACAAACTATAATAGCGCCCTGAAGTC |
| | | CAGGCTGTCTATCAGCAAGGACAACTCCAAGTCTCAGGTGTTCCTGAAG |
| | | ATGAACAGCCTGCAGACCGACGATACAGCCCGGTACTATTGTGCCAGA |
| | | GGCTCCGGCACCTGGTACTTTGACGTGTGGGGGGCAGGGACCACAGTG |
| | | ACAGTGAGCTCCGCTAGCACAAAGGGCCCCTCCGTGTTTCCTCTGGCCC |
| | | CATCCTCTAAGTCCACCTCTGGAGGAACAGCCGCCCTGGGCTGTCTGGT |
| | | GAAGGATTACTTCCCTGAGCCAGTGACCGTGTCCTGGAACTCTGGGGCC |
| | | CTGACCAGCGGAGTGCACACATTTCCCGCCGTGCTGCAGAGCTCCGGAC |
| | | TGTACTCCCTGTCTAGCGTGGTGACCGTGCCTTCCTCTAGCCTGGGCACC |
| | | CAGACATATATCTGCAACGTGAATCACAAGCCTTCCAATACAAAGGTCG |
| | | ACAAGAAGGTGGAGCCAAAGTCTTGTGATAAGACCCACACATGCCCAC |
| | | CTTGTCCGGCGCCAGAGGCCGCCGGAGGACCAAGCGTGTTCCTGTTTCC |
| | | ACCCAAGCCCAAGGACACCCTGATGATCTCCCGGACCCCAGAGGTGAC |
| | | ATGCGTGGTGGTGAGCGTGTCCCACGAGGACCCCGAGGTGAAGTTTAA |
| | | CTGGTACGTGGATGGCGTGGAGGTGCACAATGCCAAGACAAAGCCCCG |
| | | GGAGGAGCAGTACAATTCTACCTATAGAGTGGTGAGCGTGCTGACAGT |
| | | GCTGCACCAGGATTGGCTGAACGGCAAGGAGTATAAGTGTAAGGTGAG |
| | | CAATAAGGCCCTGCCAGCCCCCATCGAGAAGACCATCTCCAAGGCCAA |
| | | GGGCCAGCCTCGCGAGCCACAGGTGTACGTGTATCCCCCTAGCAGGGA |
| | | CGAGCTGACAAAGAACCAGGTGTCCCTGACCTGCCTGGTGAAGGGCTTC |
| | | TACCCCTCCGATATCGCCGTGGAGTGGGAGTCTAATGGCCAGCCTGAGA |
| | | ACAATTATAAGACCACACCACCCGTGCTGGACTCTGATGGCAGCTTCGC |
| | | CCTGGTGAGCAAGCTGACAGTGGACAAGTCCAGATGGCAGCAGGGCAA |
| | | CGTGTTTTCTTGCAGCGTGATGCACGAGGCCCTGCACAATCACTACACC |
| | | CAGAAGTCCCTGTCTCTGAGCCCAGGAGGAGGAGGAGGCGATATCGTG |
| | | ATGACCCAGACACCCGCCTCCGTGGAGGCCGCCGTGGGAGGAACCGTG |
| | | ACAATCAAGTGTCAGGCCTCCCAGTCTATCTACAGCTCCCTGGCCTGGT |
| | | ATCAGCAGAAGCCTGGCCAGAGCCCAAAGCTGCTGATCTACGACGCCT |
| | | CCCACCTGGCCTCTGGAGTGCCAAGCCGGETCAGCGGCTCCAGATATGG |
| | | CACAGAGTTTACCCTGACAATCTCCGGAGTGCAGTGCGACGATGCAGCA |
| | | ACCTACTATTGTCAGGGAGGATGGTACTCTAGCGCCGCCACCTATGTGC |
| | | CTAACACATTCGGCGGCGGCACCGAGGTGGTGGTGAAGGGAGGAGGAG |
| | | GCTCCGGCGGAGGAGGCTCTGGCGGCGGCGGCAGCCAGGAGCAGCTGG |
| | | TGGAGTCTGGAGGAGGACTGGTGCAGCCTGAGGGCAGCCTGACCCTGA |
| | | CATGCAAGGCCTCCGGCTTTACCATCTCTAACAATTACTATATGTGCTG |
| | | GGTGCGGCAGGCCCCAGGCAAGGGACTGGAGTGGATCGCCTGCATCTA |
| | | CGGCGGCATCTCTGGCAGGACATACTATGCCAGCTGGGCCAAGGGCCG |
| | | CTTCACCATCTCCAAGACATCCTCTACCACAGTGACCCTGCAGATGACC |
| | | TCTCTGACAGCCGCCGATACCGCCACATACTTTTGCGTGCGGGGCTATG |
| | | TGGGCACCAGCAATCTGTGGGGCCCTGGCACCCTGGTGACAGTGAGCTC |
| | | C |
| 168 | 18555 | QVQLQESGPGLVQPTQSLSITCTVSGFSLISYGVHWVRQSPGKGLEWLGVI |
| | | WSGGSTDYNAAFISRLSISKDNSKSQVFFKMNSLQADDTAIYYCARNPLTA |
| | | TVMDYWGQGTSVTVSSASTKGPSVFPLAPSSKSTSGGTAALGCLVKDYFPE |
| | | PVTVSWNSGALTSGVHTFPAVLQSSGLYSLSSVVTVPSSSLGTQTYICNVNH |
| | | KPSNTKVDKKVEPKSCDKTHTCPPCPAPEAAGGPSVFLFPPKPKDTLMISRT |
| | | PEVTCVVVSVSHEDPEVKFNWYVDGVEVHNAKTKPREEQYNSTYRVVSV |
| | | LTVLHQDWLNGKEYKCKVSNKALPAPIEKTISKAKGQPREPQVYVYPPSRD |
| | | ELTKNQVSLTCLVKGFYPSDIAVEWESNGQPENNYKTTPPVLDSDGSFALV |
| | | SKLTVDKSRWQQGNVFSCSVMHEALHNHYTQKSLSLSPGGGGGDIVMTQ |
| | | TPASVEAAVGGTVTIKCQASQSIYSSLAWYQQKPGQSPKLLIYDASHLASG |
| | | VPSRFSGSRYGTEFTLTISGVQCDDAATYYCQGGWYSSAATYVPNTFGGGT |
| | | EVVVKGGGGSGGGGSGGGGSQEQLVESGGGLVQPEGSLTLTCKASGFTIS |
| | | NNYYMCWVRQAPGKGLEWIACIYGGISGRTYYASWAKGRFTISKTSSTTV |
| | | TLQMTSLTAADTATYFCVRGYVGTSNLWGPGTLVTVSS |
| 169 | 18555 | CAGGTGCAGCTGCAGGAGAGCGGACCAGGACTGGTGCAGCCTACACAG |
| | | TCTCTGAGCATCACCTGCACAGTGTCTGGCTTCAGCCTGATCTCCTACGG |
| | | AGTGCACTGGGTGAGGCAGTCCCCTGGCAAGGGACTGGAGTGGCTGGG |
| | | CGTGATCTGGTCTGGCGGCAGCACCGACTATAACGCCGCCTTTATCTCC |
| | | CGCCTGTCCATCTCTAAGGATAACAGCAAGTCCCAGGTGTTCTTTAAGA |
| | | TGAACAGCCTGCAGGCCGACGATACAGCCATCTACTATTGTGCCCGGAA |
| | | TCCCCTGACCGCCACAGTGATGGACTACTGGGGCCAGGGCACCTCTGTG |
| | | ACAGTGAGCTCCGCTAGCACAAAGGGCCCCTCCGTGTTTCCTCTGGCCC |
| | | CATCCTCTAAGTCCACCTCTGGAGGAACAGCCGCCCTGGGCTGTCTGGT |
| | | GAAGGATTACTTCCCTGAGCCAGTGACCGTGTCCTGGAACTCTGGGGCC |
| | | CTGACCAGCGGAGTGCACACATTTCCCGCCGTGCTGCAGAGCTCCGGAC |
| | | TGTACTCCCTGTCTAGCGTGGTGACCGTGCCTTCCTCTAGCCTGGGCACC |
| | | CAGACATATATCTGCAACGTGAATCACAAGCCTTCCAATACAAAGGTCG |
| | | ACAAGAAGGTGGAGCCAAAGTCTTGTGATAAGACCCACACATGCCCAC |
| | | CTTGTCCGGCGCCAGAGGCCGCCGGAGGACCAAGCGTGTTCCTGTTTCC |
| | | ACCCAAGCCCAAGGACACCCTGATGATCTCCCGGACCCCAGAGGTGAC |
| | | ATGCGTGGTGGTGAGCGTGTCCCACGAGGACCCCGAGGTGAAGTTTAA |
| | | CTGGTACGTGGATGGCGTGGAGGTGCACAATGCCAAGACAAAGCCCCG |
| | | GGAGGAGCAGTACAATTCTACCTATAGAGTGGTGAGCGTGCTGACAGT |
| | | GCTGCACCAGGATTGGCTGAACGGCAAGGAGTATAAGTGTAAGGTGAG |
| | | CAATAAGGCCCTGCCAGCCCCCATCGAGAAGACCATCTCCAAGGCCAA |
| | | GGGCCAGCCTCGCGAGCCACAGGTGTACGTGTATCCCCCTAGCAGGGA |
| | | CGAGCTGACAAAGAACCAGGTGTCCCTGACCTGCCTGGTGAAGGGCTTC |
| | | TACCCCTCCGATATCGCCGTGGAGTGGGAGTCTAATGGCCAGCCTGAGA |
| | | ACAATTATAAGACCACACCACCCGTGCTGGACTCTGATGGCAGCTTCGC |
| | | CCTGGTGAGCAAGCTGACAGTGGACAAGTCCAGATGGCAGCAGGGCAA |
| | | CGTGTTTTCTTGCAGCGTGATGCACGAGGCCCTGCACAATCACTACACC |
| | | CAGAAGTCCCTGTCTCTGAGCCCAGGAGGAGGAGGAGGCGATATCGTG |
| | | ATGACCCAGACACCCGCCTCCGTGGAGGCCGCCGTGGGAGGAACCGTG |
| | | ACAATCAAGTGTCAGGCCTCCCAGTCTATCTACAGCTCCCTGGCCTGGT |
| | | ATCAGCAGAAGCCTGGCCAGAGCCCAAAGCTGCTGATCTACGACGCCT |
| | | CCCACCTGGCCTCTGGAGTGCCAAGCCGGTTCAGCGGCTCCAGATATGG |
| | | CACAGAGTTTACCCTGACAATCTCCGGAGTGCAGTGCGACGATGCAGCA |
| | | ACCTACTATTGTCAGGGAGGATGGTACTCTAGCGCCGCCACCTATGTGC |
| | | CTAACACATTCGGCGGCGGCACCGAGGTGGTGGTGAAGGGAGGAGGAG |
| | | GCTCCGGCGGAGGAGGCTCTGGCGGCGGCGGCAGCCAGGAGCAGCTGG |
| | | TGGAGTCTGGAGGAGGACTGGTGCAGCCTGAGGGCAGCCTGACCCTGA |
| | | CATGCAAGGCCTCCGGCTTTACCATCTCTAACAATTACTATATGTGCTG |
| | | GGTGCGGCAGGCCCCAGGCAAGGGACTGGAGTGGATCGCCTGCATCTA |
| | | CGGCGGCATCTCTGGCAGGACATACTATGCCAGCTGGGCCAAGGGCCG |
| | | CTTCACCATCTCCAAGACATCCTCTACCACAGTGACCCTGCAGATGACC |
| | | TCTCTGACAGCCGCCGATACCGCCACATACTTTTGCGTGCGGGGCTATG |
| | | TGGGCACCAGCAATCTGTGGGGCCCTGGCACCCTGGTGACAGTGAGCTC |
| | | C |
| 170 | 5244 | DIQMTQSPSSLSASVGDRVTITCRASQDVNTAVAWYQQKPGKAPKLLIYSA |
| | | SFLYSGVPSRFSGSRSGTDFTLTISSLQPEDFATYYCQQHYTTPPTFGQGTKV |
| | | EIKGGSGGGSGGGSGGGSGGGSGEVQLVESGGGLVQPGGSLRLSCAASGF |
| | | NIKDTYIHWVRQAPGKGLEWVARIYPTNGYTRYADSVKGRFTISADTSKNT |
| | | AYLQMNSLRAEDTAVYYCSRWGGDGFYAMDYWGQGTLVTVSSAAEPKS |
| | | SDKTHTCPPCPAPELLGGPSVFLFPPKPKDTLMISRTPEVTCVVVDVSHEDP |
| | | EVKFNWYVDGVEVHNAKTKPREEQYNSTYRVVSVLTVLHQDWLNGKEY |
| | | KCKVSNKALPAPIEKTISKAKGQPREPQVYVLPPSRDELTKNQVSLLCLVK |
| | | GFYPSDIAVEWESNGQPENNYLTWPPVLDSDGSFELYSKLTVDKSRWQQG |
| | | NVFSCSVMHEALHNHYTQKSLSLSPG |
| 171 | 5244 | GACATTCAGATGACACAGAGCCCCAGCTCCCTGAGTGCTTCAGTCGGCG |
| | | ACAGGGTGACTATCACCTGCCGCGCATCCCAGGATGTCAACACCGCTGT |
| | | GGCATGGTACCAGCAGAAGCCTGGAAAAGCCCCAAAGCTGCTGATCTA |
| | | CAGCGCTTCCTTCCTGTATTCTGGCGTGCCAAGTCGGTTTTCTGGAAGTA |
| | | GATCAGGCACTGACTTCACACTGACTATCTCTAGTCTGCAGCCCGAAGA |
| | | TTTTGCCACCTACTATTGCCAGCAGCACTATACCACACCCCCTACATTCG |
| | | GACAGGGCACTAAAGTGGAGATTAAGGGCGGGTCAGGCGGAGGGAGC |
| | | GGAGGAGGGTCCGGAGGAGGGTCTGGAGGAGGGAGTGGAGAGGTCCA |
| | | GCTGGTGGAATCTGGAGGAGGACTGGTGCAGCCTGGAGGCTCACTGCG |
| | | ACTGAGCTGTGCCGCTTCCGGCTTTAACATCAAAGACACATACATTCAT |
| | | TGGGTCAGGCAGGCACCAGGGAAGGGACTGGAATGGGTGGCCCGCATC |
| | | TATCCCACAAATGGGTACACTCGATATGCCGACAGCGTGAAAGGACGG |
| | | TTTACCATTTCTGCTGATACCAGTAAGAACACAGCATACCTGCAGATGA |
| | | ACAGCCTGCGCGCAGAGGATACAGCCGTGTACTATTGCAGTCGATGGG |
| | | GGGGAGACGGCTTCTACGCCATGGATTATTGGGGCCAGGGGACTCTGGT |
| | | CACCGTGTCAAGCGCAGCCGAACCTAAATCCTCTGACAAGACCCACAC |
| | | ATGCCCACCCTGTCCTGCTCCAGAGCTGCTGGGAGGACCATCCGTGTTC |
| | | CTGTTTCCTCCAAAGCCTAAAGATACACTGATGATTAGCCGCACTCCCG |
| | | AAGTCACCTGTGTGGTCGTGGACGTGTCCCACGAGGACCCCGAAGTCAA |
| | | GTTCAACTGGTACGTGGACGGCGTCGAGGTGCATAATGCCAAGACTAA |
| | | ACCAAGAGAGGAACAGTACAATTCAACCTATAGGGTCGTGAGCGTCCT |
| | | GACAGTGCTGCATCAGGATTGGCTGAACGGCAAGGAGTATAAGTGCAA |
| | | AGTGTCTAACAAGGCCCTGCCCGCTCCTATCGAGAAGACTATTAGCAAG |
| | | GCAAAAGGGCAGCCACGGGAACCCCAGGTCTACGTGCTGCCCCCTAGC |
| | | AGAGACGAGCTGACCAAAAACCAGGTCTCCCTGCTGTGTCTGGTGAAG |
| | | GGCTTTTATCCTAGTGATATCGCTGTGGAGTGGGAATCAAATGGGCAGC |
| | | CAGAAAACAATTACCTGACATGGCCACCCGTGCTGGACAGCGATGGGT |
| | | CCTTCTTTCTGTATTCCAAACTGACTGTGGACAAGTCTAGATGGCAGCA |
| | | GGGAAACGTCTTCAGCTGTTCCGTGATGCACGAGGCCCTGCACAATCAT |
| | | TACACCCAGAAGTCTCTGAGTCTGTCACCCGGC |
| 172 | 18557 | QVQLKESGPGLVAPSQSLSITCTVSGFSLTTYAISWVRQPPGKGLEWLGIIW |
| | | PGGGTNYNSALKSRLSISKDNSRSQVFLKMNSLQTDDTARYYCARGAGTW |
| | | YFDVWGAGTTVTVSSASTKGPSVFPLAPSSKSTSGGTAALGCLVKDYFPEP |
| | | VTVSWNSGALTSGVHTFPAVLQSSGLYSLSSVVTVPSSSLGTQTYICNVNH |
| | | KPSNTKVDKKVEPKSCDKTHTCPPCPAPEAAGGPSVFLFPPKPKDTLMISRT |
| | | PEVTCVVVSVSHEDPEVKFNWYVDGVEVHNAKTKPREEQYNSTYRVVSV |
| | | LTVLHQDWLNGKEYKCKVSNKALPAPIEKTISKAKGQPREPQVYVYPPSRD |
| | | ELTKNQVSLTCLVKGFYPSDIAVEWESNGQPENNYKTTPPVLDSDGSFALV |
| | | SKLTVDKSRWQQGNVFSCSVMHEALHNHYTQKSLSLSPGGGGGDIVMTQ |
| | | TPSSVSAAVGGTVTIKCQASQTIGSSLAWYQQKPGQPPKLLIYRASTLASGV |
| | | SSRFRGSGSGTEYTLTISDLECADAATYYCQWTDYGYIYIWAFGGGTEVVV |
| | | KGGGGSGGGGSGGGGSQEQLVESGGGLVQPEGSLTLTCTASKFSFSSLYY |
| | | MCWVRQAPGKGLEWIACVYGGSSGNTYYASWAKGRFTISKASSITVTLQL |
| | | TSLTAADTATYFCARFDVDGSGFNLWGPGTLVTVSS |
| 173 | 18557 | CAGGTGCAGCTGAAGGAGTCCGGACCAGGACTGGTGGCCCCCTCTCAG |
| | | AGCCTGTCCATCACCTGCACAGTGAGCGGCTTTTCCCTGACCACATACG |
| | | CAATCTCTTGGGTGCGGCAGCCACCTGGCAAGGGACTGGAGTGGCTGG |
| | | GAATCATCTGGCCAGGAGGAGGCACAAACTATAATTCTGCCCTGAAGA |
| | | GCAGGCTGTCTATCAGCAAGGACAACTCCCGCTCTCAGGTGTTCCTGAA |
| | | GATGAACAGCCTGCAGACCGACGATACAGCAAGGTACTATTGTGCCCG |
| | | GGGGGCAGGGACCTGGTACTTTGACGTGTGGGGGGCAGGGACCACAGT |
| | | GACAGTGAGCTCCGCTAGCACAAAGGGCCCCTCCGTGTTTCCTCTGGCC |
| | | CCATCCTCTAAGTCCACCTCTGGAGGAACAGCCGCCCTGGGCTGTCTGG |
| | | TGAAGGATTACTTCCCTGAGCCAGTGACCGTGTCCTGGAACTCTGGGGC |
| | | CCTGACCAGCGGAGTGCACACATTTCCCGCCGTGCTGCAGAGCTCCGGA |
| | | CTGTACTCCCTGTCTAGCGTGGTGACCGTGCCTTCCTCTAGCCTGGGCAC |
| | | CCAGACATATATCTGCAACGTGAATCACAAGCCTTCCAATACAAAGGTC |
| | | GACAAGAAGGTGGAGCCAAAGTCTTGTGATAAGACCCACACATGCCCA |
| | | CCTTGTCCGGCGCCAGAGGCCGCCGGAGGACCAAGCGTGTTCCTGTTTC |
| | | CACCCAAGCCCAAGGACACCCTGATGATCTCCCGGACCCCAGAGGTGA |
| | | CATGCGTGGTGGTGAGCGTGTCCCACGAGGACCCCGAGGTGAAGTTTA |
| | | ACTGGTACGTGGATGGCGTGGAGGTGCACAATGCCAAGACAAAGCCCC |
| | | GGGAGGAGCAGTACAATTCTACCTATAGAGTGGTGAGCGTGCTGACAG |
| | | TGCTGCACCAGGATTGGCTGAACGGCAAGGAGTATAAGTGTAAGGTGA |
| | | GCAATAAGGCCCTGCCAGCCCCCATCGAGAAGACCATCTCCAAGGCCA |
| | | AGGGCCAGCCTCGCGAGCCCCAGGTGTACGTGTATCCCCCTAGCAGAG |
| | | ACGAGCTGACAAAGAACCAGGTGTCCCTGACCTGCCTGGTGAAGGGCT |
| | | TCTATCCCTCTGATATCGCCGTGGAGTGGGAGAGCAATGGCCAGCCTGA |
| | | GAACAATTACAAGACCACACCACCCGTGCTGGACAGCGATGGCTCCTTC |
| | | GCCCTGGTGAGCAAGCTGACAGTGGACAAGTCCAGGTGGCAGCAGGGC |
| | | AACGTGTTTTCTTGCAGCGTGATGCACGAGGCCCTGCACAATCACTATA |
| | | CCCAGAAGTCCCTGTCTCTGAGCCCAGGAGGAGGAGGAGGCGATATCG |
| | | TGATGACCCAGACACCAAGCTCCGTGAGCGCCGCCGTGGGAGGAACCG |
| | | TGACAATCAAGTGTCAGGCCTCCCAGACCATCGGCTCTAGCCTGGCCTG |
| | | GTATCAGCAGAAGCCTGGCCAGCCTCCAAAGCTGCTGATCTACAGAGCC |
| | | TCCACACTGGCCTCTGGCGTGTCCTCTCGGYTCAGAGGCTCCGGCTCTG |
| | | GCACCGAGTACACCCTGACAATCAGCGACCTGGAGTGCGCAGATGCAG |
| | | CAACATACTATTGTCAGTGGACCGACTACGGCTATATCTACATCTGGGC |
| | | CTTTGGCGGAGGAACCGAGGTGGTGGTGAAGGGAGGAGGAGGCAGCG |
| | | GCGGCGGAGGCTCCGGCGGCGGCGGCTCTCAGGAGCAGCTGGTGGAGT |
| | | CTGGAGGAGGACTGGTGCAGCCTGAGGGCTCCCTGACCCTGACATGCA |
| | | CCGCCTCTAAGTTCAGCTTTAGCTCCCTGTACTATATGTGCTGGGTGAGG |
| | | CAGGCCCCAGGCAAGGGACTGGAGTGGATCGCCTGCGTGTATGGCGGC |
| | | TCTAGCGGCAACACCTACTATGCCTCCTGGGCCAAGGGCCGCTTCACAA |
| | | TCTCTAAGGCCTCCTCTACCACAGTGACCCTGCAGCTGACAAGCCTGAC |
| | | CGCCGCCGATACAGCCACCTACTTCTGTGCCCGGTTTGACGTGGATGGC |
| | | TCCGCCTTTAATCTGTGGGGACCAGGCACACTGGTGACCGTGAGCTCC |
| 174 | 18558 | QVQLKQSGPGLVQPSQSLSITCTVSGFSLTSYGVHWVRQSPGKGLEWLGVI |
| | | WSGGSTDYNAAFISRLSISKDNSKSQVFFKMNSLQADDTAIYYCARNPLTA |
| | | TVMDYWGQGTSVTVSSASTKGPSVFPLAPSSKSTSGGTAALGCLVKDYFPE |
| | | PVTVSWNSGALTSGVHTFPAVLQSSGLYSLSSVVTVPSSSLGTQTYICNVNH |
| | | KPSNTKVDKKVEPKSCDKTHTCPPCPAPEAAGGPSVFLFPPKPKDTLMISRT |
| | | PEVTCVVVSVSHEDPEVKFNWYVDGVEVHNAKTKPREEQYNSTYRVVSV |
| | | LTVLHQDWLNGKEYKCKVSNKALPAPIEKTISKAKGQPREPQVYVYPPSRD |
| | | ELTKNQVSLTCLVKGFYPSDIAVEWESNGQPENNYKTTPPVLDSDGSFALV |
| | | SKLTVDKSRWQQGNVFSCSVMHEALHNHYTQKSLSLSPGGGGGDIVMTQ |
| | | TPSSVSAAVGGTVTIKCQASQTIGSSLAWYQQKPGQPPKLLIYRASTLASGV |
| | | SSRFRGSGSGTEYTLTISDLECADAATYYCQWTDYGYIYIWAFGGGTEVVV |
| | | KGGGGSGGGGSGGGGSQEQLVESGGGLVQPEGSLILTCTASKFSFSSLYY |
| | | MCWVRQAPGKGLEWIACVYGGSSGNTYYASWAKGRFTISKASSTTVTLQL |
| | | TSLTAADTATYFCARFDVDGSGFNLWGPGTLVTVSS |
| 175 | 18558 | CAGGTGCAGCTGAAGCAGTCCGGACCAGGACTGGTGCAGCCTTCTCAG |
| | | AGCCTGTCCATCACCTGCACAGTGAGCGGCTTCTCCCTGACCTCTTACG |
| | | GCGTGCACTGGGTGAGGCAGTCTCCTGGCAAGGGACTGGAGTGGCTGG |
| | | GCGTGATCTGGAGCGGAGGCTCCACAGACTATAACGCCGCCTTTATCTC |
| | | TCGCCTGTCTATCAGCAAGGATAACTCCAAGTCTCAGGTGTTCTTTAAG |
| | | ATGAATAGCCTGCAGGCCGACGATACAGCCATCTACTATTGTGCCCGGA |
| | | ATCCCCTGACCGCCACAGTGATGGACTACTGGGGCCAGGGCACCAGCG |
| | | TGACAGTGAGCTCCGCTAGCACAAAGGGCCCCTCCGTGTTTCCTCTGGC |
| | | CCCATCCTCTAAGTCCACCTCTGGAGGAACAGCCGCCCTGGGCTGTCTG |
| | | GTGAAGGATTACTTCCCTGAGCCAGTGACCGTGTCCTGGAACTCTGGGG |
| | | CCCTGACCAGCGGAGTGCACACATTTCCCGCCGTGCTGCAGAGCTCCGG |
| | | ACTGTACTCCCTGTCTAGCGTGGTGACCGTGCCTTCCTCTAGCCTGGGCA |
| | | CCCAGACATATATCTGCAACGTGAATCACAAGCCTTCCAATACAAAGGT |
| | | CGACAAGAAGGTGGAGCCAAAGTCTTGTGATAAGACCCACACATGCCC |
| | | ACCTTGTCCGGCGCCAGAGGCCGCCGGAGGACCAAGCGTGTTCCTGTTT |
| | | CCACCCAAGCCCAAGGACACCCTGATGATCTCCCGGACCCCAGAGGTG |
| | | ACATGCGTGGTGGTGAGCGTGTCCCACGAGGACCCCGAGGTGAAGTTT |
| | | AACTGGTACGTGGATGGCGTGGAGGTGCACAATGCCAAGACAAAGCCC |
| | | CGGGAGGAGCAGTACAATTCTACCTATAGAGTGGTGAGCGTGCTGACA |
| | | GTGCTGCACCAGGATTGGCTGAACGGCAAGGAGTATAAGTGTAAGGTG |
| | | AGCAATAAGGCCCTGCCAGCCCCCATCGAGAAGACCATCTCCAAGGCC |
| | | AAGGGCCAGCCTCGCGAGCCCCAGGTGTACGTGTATCCCCCTAGCAGA |
| | | GACGAGCTGACAAAGAACCAGGTGTCCCTGACCTGCCTGGTGAAGGGC |
| | | TTCTATCCCTCTGATATCGCCGTGGAGTGGGAGAGCAATGGCCAGCCTG |
| | | AGAACAATTACAAGACCACACCACCCGTGCCGGACAGCGATGGCTCCTT |
| | | CGCCCTGGTGAGCAAGCTGACAGTGGACAAGTCCAGGTGGCAGCAGGG |
| | | CAACGTGTTTTCTTGCAGCGTGATGCACGAGGCCCTGCACAATCACTAT |
| | | ACCCAGAAGTCCCTGTCTCTGAGCCCAGGAGGAGGAGGAGGCGATATC |
| | | GTGATGACCCAGACACCAAGCTCCGTGAGCGCCGCCGTGGGAGGAACC |
| | | GTGACAATCAAGTGTCAGGCCTCCCAGACCATCGGCTCTAGCCTGGCCT |
| | | GGTATCAGCAGAAGCCTGGCCAGCCTCCAAAGCTGCTGATCTACAGAG |
| | | CCTCCACACTGGCCTCTGGCGTGTCCTCTCGGTTCAGAGGCTCCGGCTCT |
| | | GGCACCGAGTACACCCTGACAATCAGCGACCTGGAGTGCGCAGATGCA |
| | | GCAACATACTATTGTCAGTGGACCGACTACGGCTATATCTACATCTGGG |
| | | CCTTTGGCGGAGGAACCGAGGTGGTGGTGAAGGGAGGAGGAGGCAGCG |
| | | GCGGCGGAGGCTCCGGCGGCGGCGGCTCTCAGGAGCAGCTGGTGGAGT |
| | | CTGGAGGAGGACTGGTGCAGCCTGAGGGCTCCCTGACCCTGACATGCA |
| | | CCGCCTCTAAGTTCAGCTTTAGCTCCCTGTACTATATGTGCTGGGTGAGG |
| | | CAGGCCCCAGGCAAGGGACTGGAGTGGATCGCCTGCGTGTATGGCGGC |
| | | TCTAGCGGCAACACCTACTATGCCTCCTGGGCCAAGGGCCGCTTCACAA |
| | | TCTCTAAGGCCTCCTCTACCACAGTGACCCTGCAGCTGACAAGCCTGAC |
| | | CGCCGCCGATACAGCCACCTACTTCTGTGCCCGGTTTGACGTGGATGGC |
| | | TCCGGCTTTAATCTGTGGGGACCAGGCACACTGGTGACCGTGAGCTCC |
| 176 | 18559 | QVQLKESGPGLVAPSQSLSITCTVSGFSLTSYAINWVRQPPGKGLEWLGVL |
| | | WPGGGTNYNSALKSRLSISKDNSKSQVFLKMNSLQTDDTARYYCARGSGT |
| | | WYFDVWGAGTTVTVSSASTKGPSVFPLAPSSKSTSGGTAALGCLVKDYFPE |
| | | PVTVSWNSGALTSGVHTFPAVLQSSGLYSLSSVVTVPSSSLGTQTYICNVNH |
| | | KPSNTKVDKKVEPKSCDKTHTCPPCPAPEAAGGPSVFLFPPKPKDTLMISRT |
| | | PEVTCVVVSVSHEDPEVKFNWYVDGVEVHNAKTKPREEQYNSTYRVVSV |
| | | LTVLHQDWLNGKEYKCKVSNKALPAPIEKTISKAKGQPREPQVYVYPPSRD |
| | | ELTKNQVSLTCLVKGFYPSDIAVEWESNGQPENNYKTTPPVLDSDGSFALV |
| | | SKLTVDKSRWQQGNVFSCSVMHEALHNHYTQKSLSLSPGGGGGDIVMTQ |
| | | TPSSVSAAVGGTVTIKCQASQTIGSSLAWYQQKPGQPPKLLIYRASTLASGV |
| | | SSRFRGSGSGTEYTLTISDLECADAATYYCQWTDYGYIYIWAFGGGTEVVV |
| | | KGGGGSGGGGSGGGGSQEQLVESGGGLVQPEGSLTLTCTASKFSFSSLYY |
| | | MCWVRQAPGKGLEWIACVYGGSSGNTYYASWAKGRFTISKASSTTVTLQL |
| | | TSLTAADTATYFCARFDVDGSGFNLWGPGTLVTVSS |
| 177 | 18559 | CAGGTGCAGCTGAAGGAGAGCGGACCAGGACTGGTGGCCCCCTCTCAG |
| | | AGCCTGTCCATCACCTGCACAGTGAGCGGCTTTTCCCTGACCTCTTACGC |
| | | CATCAACTGGGTGCGGCAGCCACCTGGCAAGGGACTGGAGTGGCTGGG |
| | | CGTGCTGTGGCCAGGAGGAGGCACAAACTATAATAGCGCCCTGAAGTC |
| | | CAGGCTGTCTATCAGCAAGGACAACTCCAAGTCTCAGGTGTTCCTGAAG |
| | | ATGAACAGCCTGCAGACCGACGATACAGCCCGGTACTATTGTGCCAGA |
| | | GGCTCCGGCACCTGGTACTTTGACGTGTGGGGGGCAGGGACCACAGTG |
| | | ACAGTGAGCTCCGCTAGCACAAAGGGCCCCTCCGTGTTTCCTCTGGCCC |
| | | CATCCTCTAAGTCCACCTCTGGAGGAACAGCCGCCCTGGGCTGTCTGGT |
| | | GAAGGATTACTTCCCTGAGCCAGTGACCGTGTCCTGGAACTCTGGGGCC |
| | | CTGACCAGCGGAGTGCACACATTTCCCGCCGTGCTGCAGAGCTCCGGAC |
| | | TGTACTCCCTGTCTAGCGTGGTGACCGTGCCTTCCTCTAGCCTGGGCACC |
| | | CAGACATATATCTGCAACGTGAATCACAAGCCTTCCAATACAAAGGTCG |
| | | ACAAGAAGGTGGAGCCAAAGTCTTGTGATAAGACCCACACATGCCCAC |
| | | CTTGTCCGGCGCCAGAGGCCGCCGGAGGACCAAGCGTGTTCCTGTTTCC |
| | | ACCCAAGCCCAAGGACACCCTGATGATCTCCCGGACCCCAGAGGTGAC |
| | | ATGCGTGGTGGTGAGCGTGTCCCACGAGGACCCCGAGGTGAAGTTTAA |
| | | CTGGTACGTGGATGGCGTGGAGGTGCACAATGCCAAGACAAAGCCCCG |
| | | GGAGGAGCAGTACAATTCTACCTATAGAGTGGTGAGCGTGCTGACAGT |
| | | GCTGCACCAGGATTGGCTGAACGGCAAGGAGTATAAGTGTAAGGTGAG |
| | | CAATAAGGCCCTGCCAGCCCCCATCGAGAAGACCATCTCCAAGGCCAA |
| | | GGGCCAGCCTCGCGAGCCCCAGGTGTACGTGTATCCCCCTAGCAGAGAC |
| | | GAGCTGACAAAGAACCAGGTGTCCCTGACCTGCCTGGTGAAGGGCTTCT |
| | | ATCCCTCTGATATCGCCGTGGAGTGGGAGAGCAATGGCCAGCCTGAGA |
| | | ACAATTACAAGACCACACCACCCGTGCTGGACAGCGATGGCTCCTTCGC |
| | | CCTGGTGAGCAAGCTGACAGTGGACAAGTCCAGGTGGCAGCAGGGCAA |
| | | CGTGTTTTCTTGCAGCGTGATGCACGAGGCCCTGCACAATCACTATACC |
| | | CAGAAGTCCCTGTCTCTGAGCCCAGGAGGAGGAGGAGGCGATATCGTG |
| | | ATGACCCAGACACCAAGCTCCGTGAGCGCCGCCGTGGGAGGAACCGTG |
| | | ACAATCAAGTGTCAGGCCTCCCAGACCATCGGCTCTAGCCTGGCCTGGT |
| | | ATCAGCAGAAGCCTGGCCAGCCTCCAAAGCTGCTGATCTACAGAGCCTC |
| | | CACACTGGCCTCTGGCGTGTCCTCTCGGTTCAGAGGCTCCGGCTCTGGC |
| | | ACCGAGTACACCCTGACAATCAGCGACCTGGAGTGCGCAGATGCAGCA |
| | | ACATACTATTGTCAGTGGACCGACTACGGCTATATCTACATCTGGGCCT |
| | | TTGGCGGAGGAACCGAGGTGGTGGTGAAGGGAGGAGGAGGCAGCGGC |
| | | GGCGGAGGCTCCGGCGGCGGCGGCTCTCAGGAGCAGCTGGTGGAGTCT |
| | | GGAGGAGGACTGGTGCAGCCTGAGGGCTCCCTGACCCTGACATGCACC |
| | | GCCTCTAAGTTCAGCTTTAGCTCCCTGTACTATATGTGCTGGGTGAGGC |
| | | AGGCCCCAGGCAAGGGACTGGAGTGGATCGCCTGCGTGTATGGCGGCT |
| | | CTAGCGGCAACACCTACTATGCCTCCTGGGCCAAGGGCCGCTTCACAAT |
| | | CTCTAAGGCCTCCTCTACCACAGTGACCCTGCAGCTGACAAGCCTGACC |
| | | GCCGCCGATACAGCCACCTACTTCTGTGCCCGGTTTGACGTGGATGGCT |
| | | CCGGCTTTAATCTGTGGGGACCAGGCACACTGGTGACCGTGAGCTCC |
| 178 | 18560 | QVQLQESGPGLVQPTQSLSITCTVSGFSLISYGVHWVRQSPGKGLEWLGVI |
| | | WSGGSTDYNAAFISRLSISKDNSKSQVFFKMNSLQADDTAIYYCARNPLTA |
| | | TVMDYWGQGTSVTVSSASTKGPSVFPLAPSSKSTSGGTAALGCLVKDYFPE |
| | | PVTVSWNSGALTSGVHTFPAVLQSSGLYSLSSVVTVPSSSLGTQTYICNVNH |
| | | KPSNTKVDKKVEPKSCDKTHTCPPCPAPEAAGGPSVFLFPPKPKDTLMISRT |
| | | PEVTCVVVSVSHEDPEVKFNWYVDGVEVHNAKTKPREEQYNSTYRVVSV |
| | | LTVLHQDWLNGKEYKCKVSNKALPAPIEKTISKAKGQPREPQVYVYPPSRD |
| | | ELTKNQVSLTCLVKGFYPSDIAVEWESNGQPENNYKTTPPVLDSDGSFALV |
| | | SKLTVDKSRWQQGNVFSCSVMHEALHNHYTQKSLSLSPGGGGGDIVMTQ |
| | | TPSSVSAAVGGTVTIKCQASQTIGSSLAWYQQKPGQPPKLLIYRASTLASGV |
| | | SSRFRGSGSGTEYTLTISDLECADAATYYCQWTDYGYIYIWAFGGGTEVVV |
| | | KGGGGSGGGGSGGGGSQEQLVESGGGLVQPEGSLTLTCTASKFSFSSLYY |
| | | MCWVRQAPGKGLEWIACVYGGSSGNTYYASWAKGRFTISKASSTTVTLQL |
| | | TSLTAADTATYFCARFDVDGSGFNLWGPGTLNTVSS |
| 179 | 18560 | CAGGTGCAGCTGCAGGAGAGCGGACCAGGACTGGTGCAGCCTACACAG |
| | | TCTCTGAGCATCACCTGCACAGTGTCTGGCTTCAGCCTGATCTCCTACGG |
| | | AGTGCACTGGGTGAGGCAGTCCCCTGGCAAGGGACTGGAGTGGCTGGG |
| | | CGTGATCTGGTCTGGCGGCAGCACCGACTATAACGCCGCCTTTATCTCC |
| | | CGCCTGTCCATCTCTAAGGATAACAGCAAGTCCCAGGTGTTCTTTAAGA |
| | | TGAACAGCCTGCAGGCCGACGATACAGCCATCTACTATTGTGCCCGGAA |
| | | TCCCCTGACCGCCACAGTGATGGACTACTGGGGCCAGGGCACCTCTGTG |
| | | ACAGTGAGCTCCGCTAGCACAAAGGGCCCCTCCGTGTTTCCTCTGGCCC |
| | | CATCCTCTAAGTCCACCTCTGGAGGAACAGCCGCCCTGGGCTGTCTGGT |
| | | GAAGGATTACTTCCCTGAGCCAGTGACCGTGTCCTGGAACTCTGGGGCC |
| | | CTGACCAGCGGAGTGCACACATTTCCCGCCGTGCTGCAGAGCTCCGGAC |
| | | TGTACTCCCTGTCTAGCGTGGTGACCGTGCCTTCCTCTAGCCTGGGCACC |
| | | CAGACATATATCTGCAACGTGAATCACAAGCCTTCCAATACAAAGGTCG |
| | | ACAAGAAGGTGGAGCCAAAGTCTTGTGATAAGACCCACACATGCCCAC |
| | | CTTGTCCGGCGCCAGAGGCCGCCGGAGGACCAAGCGTGTTCCTGTTTCC |
| | | ACCCAAGCCCAAGGACACCCTGATGATCTCCCGGACCCCAGAGGTGAC |
| | | ATGCGTGGTGGTGAGCGTGTCCCACGAGGACCCCGAGGTGAAGTTTAA |
| | | CTGGTACGTGGATGGCGTGGAGGTGCACAATGCCAAGACAAAGCCCCG |
| | | GGAGGAGCAGTACAATTCTACCTATAGAGTGGTGAGCGTGCTGACAGT |
| | | GCTGCACCAGGATTGGCTGAACGGCAAGGAGTATAAGTGTAAGGTGAG |
| | | CAATAAGGCCCTGCCAGCCCCCATCGAGAAGACCATCTCCAAGGCCAA |
| | | GGGCCAGCCTCGCGAGCCCCAGGTGTACGTGTATCCCCCTAGCAGAGAC |
| | | GAGCTGACAAAGAACCAGGTGTCCCTGACCTGCCTGGTGAAGGGCTTCT |
| | | ATCCCTCTGATATCGCCGTGGAGTGGGAGAGCAATGGCCAGCCTGAGA |
| | | ACAATTACAAGACCACACCACCCGTGCTGGACAGCGATGGCTCCTTCGC |
| | | CCTGGTGAGCAAGCTGACAGTGGACAAGTCCAGGTGGCAGCAGGGCAA |
| | | CGTGTTTTCTTGCAGCGTGATGCACGAGGCCCTGCACAATCACTATACC |
| | | CAGAAGTCCCTGTCTCTGAGCCCAGGAGGAGGAGGAGGCGATATCGTG |
| | | ATGACCCAGACACCAAGCTCCGTGAGCGCCGCCGTGGGAGGAACCGTG |
| | | ACAATCAAGTGTCAGGCCTCCCAGACCATCGGCTCTAGCCTGGCCTGGT |
| | | ATCAGCAGAAGCCTGGCCAGCCTCCAAAGCTGCTGATCTACAGAGCCTC |
| | | CACACTGGCCTCTGGCGTGTCCTCTCGGTTCAGAGGCTCCGGCTCTGGC |
| | | ACCGAGTACACCCTGACAATCAGCGACCTGGAGTGCGCAGATGCAGCA |
| | | ACATACTATTGTCAGTGGACCGACTACGGCTATATCTACATCTGGGCCT |
| | | TTGGCGGAGGAACCGAGGTGGTGGTGAAGGGAGGAGGAGGCAGCGGC |
| | | GGCGGAGGCTCCGGCGGCGGCGGCTCTCAGGAGCAGCTGGTGGAGTCT |
| | | GGAGGAGGACTGGTGCAGCCTGAGGGCTCCCTGACCCTGACATGCACC |
| | | GCCTCTAAGTTCAGCTCTAGCTCCCTGTACTATATGTGCTGGGTGAGGC |
| | | AGGCCCCAGGCAAGGGACTGGAGTGGATCGCCTGCGTGTATGGCGGCT |
| | | CTAGCGGCAACACCTACTATGCCTCCTGGGCCAAGGGCCGCTTCACAAT |
| | | CTCTAAGGCCTCCTCTACCACAGTGACCCTGCAGCTGACAAGCCTGACC |
| | | GCCGCCGATACAGCCACCTACTTCTGTGCCCGGTTTGACGTGGATGGCT |
| | | CCGGCTTTAATCTGTGGGGACCAGGCACACTGGTGACCGTGAGCTCC |
| 180 | 18561 | QVQLKESGPGLVAPSQSLSITCTVSGFSLTSYAISWVRQPPGKGLEWLGVIW |
| | | PGGGTNYNSALKSRLSISKDNSKSQVFLKMNSLQTDDTARYYCARGTGTW |
| | | YFDVWGAGTTVTVSSASTKGPSVFPLAPSSKSTSGGTAALGCLVKDYFPEP |
| | | VTVSWNSGALTSGVHTFPAVLQSSGLYSLSSVVTVPSSSLGTQTYICNVNH |
| | | KPSNTKVDKKVEPKSCDKTHTCPPCPAPEAAGGPSVFLFPPKPKDTLMISRT |
| | | PEVTCVVVSVSHEDPEVKFNWYVDGVEVHNAKTKPREEQYNSTYRVVSV |
| | | LTVLHQDWLNGKEYKCKVSNKALPAPIEKTISKAKGQPREPQVYVYPPSRD |
| | | ELTKNQVSLTCLVKGFYPSDIAVEWESNGQPENNYKTTPPVLDSDGSFALV |
| | | SKLTVDKSRWQQGNVFSCSVMHEALHNHYTQKSLSLSPGGGGGDIVMTQ |
| | | TPSSVSAAVGGTVTIKCQASQTIGSSLAWYQQKPGQPPKLLIYRASTLASGV |
| | | SSRFRGSGSGTEYTLTISDLECADAATYYCQWTDYGYIYIWAFGGGTEVVV |
| | | KGGGGSGGGGSGGGGSQEQLVESGGGLVQPEGSLTLTCTASKFSFSSLYY |
| | | MCWVRQAPGKGLEWIACVYGGSSGNTYYASWAKGRFTISKASSTTVTLQL |
| | | TSLTAADTATYFCARFDVDGSGFNLWGPGTLNTVSS |
| 181 | 18561 | CAGGTGCAGCTGAAGGAGTCTGGACCAGGACTGGTGGCCCCCTCTCAG |
| | | AGCCTGTCCATCACCTGCACAGTGAGCGGCTTTTCCCTGACCTCTTACGC |
| | | AATCTCCTGGGTGCGGCAGCCACCTGGCAAGGGACTGGAGTGGCTGGG |
| | | CGTGATCTGGCCAGGAGGAGGCACAAACTATAATAGCGCCCTGAAGTC |
| | | CAGGCTGTCTATCAGCAAGGACAACTCCAAGTCTCAGGTGTTCCTGAAG |
| | | ATGAATAGCCTGCAGACCGACGATACAGCCCGGTACTATTGTGCCAGA |
| | | GGCACCGGCACATGGTACTTTGACGTGTGGGGGGCAGGGACCACAGTG |
| | | ACAGTGAGCTCCGCTAGCACAAAGGGCCCCTCCGTGTTTCCTCTGGCCC |
| | | CATCCTCTAAGTCCACCTCTGGAGGAACAGCCGCCCTGGGCTGTCTGGT |
| | | GAAGGATTACTTCCCTGAGCCAGTGACCGTGTCCTGGAACTCTGGGGCC |
| | | CTGACCAGCGGAGTGCACACATTTCCCGCCGTGCTGCAGAGCTCCGGAC |
| | | TGTACTCCCTGTCTAGCGTGGTGACCGTGCCTTCCTCTAGCCTGGGCACC |
| | | CAGACATATATCTGCAACGTGAATCACAAGCCTTCCAATACAAAGGTCG |
| | | ACAAGAAGGTGGAGCCAAAGTCTTGTGATAAGACCCACACATGCCCAC |
| | | CTTGTCCGGCGCCAGAGGCCGCCGGAGGACCAAGCGTGTTCCTGTTTCC |
| | | ACCCAAGCCCAAGGACACCCTGATGATCTCCCGGACCCCAGAGGTGAC |
| | | ATGCGTGGTGGTGAGCGTGTCCCACGAGGACCCCGAGGTGAAGTTTAA |
| | | CTGGTACGTGGATGGCGTGGAGGTGCACAATGCCAAGACAAAGCCCCG |
| | | GGAGGAGCAGTACAATTCTACCTATAGAGTGGTGAGCGTGCTGACAGT |
| | | GCTGCACCAGGATTGGCTGAACGGCAAGGAGTATAAGTGTAAGGTGAG |
| | | CAATAAGGCCCTGCCAGCCCCCATCGAGAAGACCATCTCCAAGGCCAA |
| | | GGGCCAGCCTCGCGAGCCCCAGGTGTACGTGTATCCCCCTAGCAGAGAC |
| | | GAGCTGACAAAGAACCAGGTGTCCCTGACCTGCCTGGTGAAGGGCTTCT |
| | | ATCCCTCTGATATCGCCGTGGAGTGGGAGAGCAATGGCCAGCCTGAGA |
| | | ACAATTACAAGACCACACCACCCGTGCTGGACAGCGATGGCTCCTTCGC |
| | | CCTGGTGAGCAAGCTGACAGTGGACAAGTCCAGGTGGCAGCAGGGCAA |
| | | CGTGTTTTCTTGCAGCGTGATGCACGAGGCCCTGCACAATCACTATACC |
| | | CAGAAGTCCCTGTCTCTGAGCCCAGGAGGAGGAGGAGGCGATATCGTG |
| | | ATGACCCAGACACCAAGCTCCGTGAGCGCCGCCGTGGGAGGAACCGTG |
| | | ACAATCAAGTGTCAGGCCTCCCAGACCATCGGCTCTAGCCTGGCCTGGT |
| | | ATCAGCAGAAGCCTGGCCAGCCTCCAAAGCTGCTGATCTACAGAGCCTC |
| | | CACACTGGCCTCTGGCGTGTCCTCTCGGTTCAGAGGCTCCGGCTCTGGC |
| | | ACCGAGTACACCCTGACAATCAGCGACCTGGAGTGCGCAGATGCAGCA |
| | | ACATACTATTGTCAGTGGACCGACTACGGCTATATCTACATCTGGGCCT |
| | | TTGGCGGAGGAACCGAGGTGGTGGTGAAGGGAGGAGGAGGCAGCGGC |
| | | GGCGGAGGCTCCGGCGGCGGCGGCTCTCAGGAGCAGCTGGTGGAGTCT |
| | | GGAGGAGGACTGGTGCAGCCTGAGGGCTCCCTGACCCTGACATGCACC |
| | | GCCTCTAAGTTCAGCTCTAGCTCCCTGTACTATATGTGCTGGGTGAGGC |
| | | AGGCCCCAGGCAAGGGACTGGAGTGGATCGCCTGCGTGTATGGCGGCT |
| | | CTAGCGGCAACACCTACTATGCCTCCTGGGCCAAGGGCCGCTTCACAAT |
| | | CTCTAAGGCCTCCTCTACCACAGTGACCCTGCAGCTGACAAGCCTGACC |
| | | GCCGCCGATACAGCCACCTACTTCTGTGCCCGGTTTGACGTGGATGGCT |
| | | CCGGCTTTAATCTGTGGGGACCAGGCACACTGGTGACCGTGAGCTCC |
| 182 | 14471 | DIQMTQSTSSLSASVGDRVTISCSASQGISNYLNWYQQKPDGTVKLLIYYTS |
| | | SLHSGVPSRFSGSGSGTDYSLTISNLEPEDIATYYCQQYSKFPWTFGGGTKL |
| | | EIKRTVAAPSVFIFPPSDEQLKSGTASVVCLLNNFYPREAKVQWKVDNALQ |
| | | SGNSQESVTEQDSKDSTYSLSSTLTLSKADYEKHKVYACEVTHQGLSSPVT |
| | | KSFNRGEC |
| 183 | 14471 | GACATCCAGATGACCCAGTCCACAAGCTCCCTGTCCGCCTCTGTGGGCG |
| | | ATAGAGTGACAATCAGCTGCTCCGCCTCTCAGGGCATCTCTAACTACCT |
| | | GAATTGGTATCAGCAGAAGCCTGACGGCACCGTGAAGCTGCTGATCTAC |
| | | TATACATCTAGCCTGCACAGCGGAGTGCCATCCAGGTTTAGCGGCTCCG |
| | | GCTCTGGCACCGACTACTCTCTGACAATCAGCAACCTGGAGCCCGAGGA |
| | | TATCGCCACCTACTATTGTCAGCAGTATAGCAAGTTCCCTTGGACCTTTG |
| | | GCGGCGGCACAAAGCTGGAGATCAAGCGCACAGTGGCGGCGCCCAGTG |
| | | TCTTCATTTTTCCCCCTAGCGACGAACAGCTGAAGTCTGGGACAGCCAG |
| | | TGTGGTCTGTCTGCTGAACAACTTCTACCCTAGAGAGGCTAAAGTGCAG |
| | | TGGAAGGTCGATAACGCACTGCAGTCCGGAAATTCTCAGGAGAGTGTG |
| | | ACTGAACAGGACTCAAAAGATAGCACCTATTCCCTGTCAAGCACACTGA |
| | | CTCTGAGCAAGGCCGACTACGAGAAGCATAAAGTGTATGCTTGTGAAG |
| | | TCACCCACCAGGGGCTGAGTTCACCAGTCACAAAATCATTCAACAGAG |
| | | GGGAGTGC |
| 184 | 4553 | EVQLVESGGGLVQPGGSLRLSCAASGFNIKDTYIHWVRQAPGKGLEWVAR |
| | | IYPTNGYTRYADSVKGRFTISADTSKNTAYLQMNSLRAEDTAVYYCSRWG |
| | | GDGFYAMDYWGQGTLVTVSSASTKGPSVFPLAPSSKSTSGGTAALGCLVK |
| | | DYFPEPVTVSWNSGALTSGVHTFPAVLQSSGLYSLSSVVTVPSSSLGTQTYI |
| | | CNVNHKPSNTKVDKKVEPKSCDKTHTCPPCPAPELLGGPSVFLFPPKPKDT |
| | | LMISRTPEVTCVVVDVSHEDPEVKFNWYVDGVEVHNAKTKPREEQYNSTY |
| | | RVVSVLTVLHQDWLNGKEYKCKVSNKALPAPIEKTISKAKGQPREPQVYV |
| | | YPPSRDELTKNQVSLTCLVKGFYPSDIAVEWESNGQPENNYKTTPPVLDSD |
| | | GSFALVSKLTVDKSRWQQGNVFSCSVMHEALHNHYTQKSLSLSPGK |
| 185 | 4553 | GAAGTCCAGCTGGTCGAAAGCGGAGGAGGACTGGTGCAGCCAGGAGGG |
| | | TCTCTGCGACTGAGTTGCGCCGCTTCAGGCTTCAACATCAAGGACACCT |
| | | ACATTCACTGGGTGCGCCAGGCTCCTGGAAAAGGCCTGGAGTGGGTGG |
| | | CACGAATCTATCCAACTAATGGATACACCCGGTATGCAGACAGCGTGA |
| | | AGGGCCGGTTCACCATTAGCGCAGATACATCCAAAAACACTGCCTACCT |
| | | GCAGATGAACAGCCTGCGAGCCGAAGATACTGCTGTGTACTATTGCAGT |
| | | CGGTGGGGAGGCGACGGCTTCTACGCTATGGATTATTGGGGGCAGGGA |
| | | ACCCTGGTCACAGTGAGCTCCGCATCTACAAAGGGGCCTAGTGTGTTTC |
| | | CACTGGCCCCCTCTAGTAAATCCACCTCTGGGGGAACAGCAGCCCTGGG |
| | | ATGTCTGGTGAAGGACTATTTCCCAGAGCCCGTCACTGTGAGTTGGAAC |
| | | TCAGGCGCCCTGACATCCGGGGTCCATACTTTTCCTGCTGTGCTGCAGTC |
| | | AAGCGGCCTGTACTCTCTGTCCTCTGTGGTCACCGTGCCAAGTTCAAGC |
| | | CTGGGGACTCAGACCTATATCTGCAACGTGAATCACAAGCCAAGCAAT |
| | | ACAAAAGTCGACAAGAAAGTGGAACCCAAGAGCTGTGATAAAACACAT |
| | | ACTTGCCCCCCTTGTCCTGCACCAGAGCTGCTGGGAGGACCATCCGTGT |
| | | TCCTGTTTCCACCCAAGCCTAAAGACACCCTGATGATTTCCAGGACTCC |
| | | AGAAGTCACCTGCGTGGTCGTGGACGTGTCTCACGAGGACCCCGAAGTC |
| | | AAGTTCAACTGGTACGTGGATGGCGTCGAGGTGCATAATGCCAAGACA |
| | | AAACCCAGGGAGGAACAGTACAACTCAACTTATCGCGTCGTGAGCGTC |
| | | CTGACCGTGCTGCACCAGGACTGGCTGAACGGCAAGGAGTATAAGTGC |
| | | AAAGTGAGCAATAAGGCTCTGCCCGCACCTATCGAGAAAACCATTAGC |
| | | AAGGCCAAAGGGCAGCCTAGAGAACCACAGGTCTACGTGTATCCTCCA |
| | | AGCAGGGACGAGCTGACCAAGAACCAGGTCTCCCTGACATGTCTGGTG |
| | | AAAGGGTTTTACCCCAGTGATATCGCTGTGGAGTGGGAATCAAATGGAC |
| | | AGCCTGAAAACAATTATAAGACCACACCCCCTGTGCTGGACAGCGATG |
| | | GCAGCTTCGCTCTGGTCTCCAAGCTGACTGTGGATAAATCTCGGTGGCA |
| | | GCAGGGCAACGTCTTTAGTTGTTCAGTGATGCATGAGGCACTGCACAAT |
| | | CATTACACCCAGAAGAGCCTGTCCCTGTCTCCCGGCAAA |
| 186 | 10443 | DIQMTQSPSSLSASVGDRVTITCRASQDVNTAVAWYQQKPGKAPKLLIYSA |
| | | SFYSGVPSRFSGSRSGTDFTLTISSLQPEDFATYYCQQHYTTPPTFGQGTKV |
| | | EIKGGSGGGSGGGSGGGSGGGSGEVQLVESGGGLVQPGGSLRLSCAASGF |
| | | NIKDTYIHWVRQAPGKGLEWVARIYPTNGYTRYADSVKGRFTISADTSKNT |
| | | AYLQMNSLRAEDTAVYYCSRWGGDGFYAMDYWGQGTLVTVSSGGEVQL |
| | | VQSGAEVKKPGESLRISCKGSGYSFSTYWISWVRQMPGKGLEWMGKIYPG |
| | | DSYTNYSPSFQGQVTISADKSISTAYLQWSSLKASDTAMYYCARGYGIFDY |
| | | WGQGTLVTVSSASTKGPSVFPLAPSSKSTSGGTAALGCLVKDYFPEPVTVS |
| | | WNSGALTSGVHTFPAVLQSSGLYSLSSVVTVPSSSLGTQTYICNVNHKPSNT |
| | | KVDKKVEPKSCDKTHTCPPCPAPEAAGGPSVFLFPPKPKDTLMISRTPEVTC |
| | | VVVSVSHEDPEVKFNWYVDGVEVHNAKTKPREEQYNSTYRVVSVLTVLH |
| | | QDWLNGKEYKCKVSNKALPAPIEKTISKAKGQPREPQVYVLPPSRDELTKN |
| | | QVSLLCLVKGFYPSDIAVEWESNGQPENNYLTWPPVLDSDGSFFLYSKLTV |
| | | DKSRWQQGNVFSCSVMHEALHNHYTQKSLSLSPG |
| 187 | 10443 | GACATCCAGATGACACAGTCCCCAAGCTCCCTGTCCGCCTCTGTGGGCG |
| | | ACAGGGTGACCATCACATGCAGGGCCAGCCAGGATGTGAACACCGCCG |
| | | TGGCCTGGTACCAGCAGAAGCCAGGCAAGGCCCCCAAGCTGCTGATCT |
| | | ACAGCGCCTCCTTCCTGTATTCTGGCGTGCCAAGCCGGTTTTCTGGCAGC |
| | | AGATCCGGCACCGACTTCACCCTGACAATCTCTAGCCTGCAGCCCGAGG |
| | | ATTTTGCCACATACTATTGCCAGCAGCACTACACCACACCCCCTACCTTC |
| | | GGCCAGGGCACAAAGGTGGAGATCAAGGGCGGCTCCGGCGGCGGCTCT |
| | | GGAGGAGGCAGCGGAGGAGGCTCCGGCGGAGGCTCTGGCGAGGTGCA |
| | | GCTGGTGGAGAGCGGAGGAGGCCTGGTGCAGCCAGGAGGCAGCCTGAG |
| | | ACTGTCCTGTGCCGCCTCTGGCTTTAACATCAAGGACACCTACATCCAC |
| | | TGGGTGCGGCAGGCCCCCGGCAAGGGCCTGGAGTGGGTGGCCAGAATC |
| | | TATCCTACCAATGGCTACACACGGTATGCCGACTCCGTGAAGGGCCGGT |
| | | TCACCATCAGCGCCGATACCTCCAAGAACACAGCCTACCTGCAGATGAA |
| | | CAGCCTGCGGGCCGAGGATACAGCCGTGTACTATTGCAGCCGCTGGGG |
| | | AGGCGACGGCTTCTACGCCATGGATTATTGGGGCCAGGGCACCCTGGTG |
| | | ACAGTGTCCTCTGGCGGAGAAGTGCAGCTGGTGCAGTCTGGAGCCGAG |
| | | GTGAAGAAGCCCGGCGAGTCTCTGAGGATCAGCTGTAAGGGCTCCGGC |
| | | TACTCTTTTAGCACCTATTGGATCTCCTGGGTGCGCCAGATGCCTGGCA |
| | | AGGGCCTGGAATGGATGGGCAAGATCTACCCTGGCGACTCCTACACAA |
| | | ATTATTCCCCATCTTTCCAGGGCCAGGTGACCATCTCTGCCGATAAGAG |
| | | CATCTCCACAGCCTATCTGCAGTGGAGCTCCCTGAAGGCCAGCGACACC |
| | | GCCATGTACTATTGTGCCAGAGGCTACGGCATCTTCGACTACTGGGGAC |
| | | AGGGCACCCTGGTCACAGTGTCTAGCGCTAGCACTAAGGGGCCTTCCGT |
| | | GTTTCCACTGGCTCCCTCTAGTAAATCCACCTCTGGAGGCACAGCTGCA |
| | | CTGGGATGTCTGGTGAAGGATTACTTCCCTGAACCAGTCACAGTGAGTT |
| | | GGAACTCAGGGGCTCTGACAAGTGGAGTCCATACTTTTCCCGCAGTGCT |
| | | GCAGTCAAGCGGACTGTACTCCCTGTCCTCTGTGGTCACCGTGCCTAGT |
| | | TCAAGCCTGGGCACCCAGACATATATCTGCAACGTGAATCACAAGCCAT |
| | | CAAATACAAAAGTCGACAAGAAAGTGGAGCCCAAGAGCTGTGATAAAA |
| | | CTCATACCTGCCCACCTTGTCCGGCGCCAGAGGCAGCAGGAGGACCAA |
| | | GCGTGTTCCTGTTTCCACCCAAGCCCAAAGACACCCTGATGATTAGCCG |
| | | AACCCCTGAAGTCACATGCGTGGTCGTGTCCGTGTCTCACGAGGACCCA |
| | | GAAGTCAAGTTCAACTGGTACGTGGATGGCGTCGAGGTGCATAATGCC |
| | | AAGACAAAACCCCGGGAGGAACAGTACAACAGCACCTATAGAGTCGTG |
| | | TCCGTCCTGACAGTGCTGCACCAGGATTGGCTGAACGGCAAGGAATATA |
| | | AGTGCAAAGTGTCCAATAAGGCCCTGCCCGCTCCTATCGAGAAAACCAT |
| | | TTCTAAGGCAAAAGGCCAGCCTCGCGAACCACAGGTCTACGTGCTGCCT |
| | | CCATCCCGGGACGAGCTGACAAAGAACCAGGTCTCTCTGCTGTGCCTGG |
| | | TGAAAGGCTTCTATCCATCAGATATTGCTGTGGAGTGGGAAAGCAATGG |
| | | GCAGCCCGAGAACAATTACCTGACTTGGCCCCCTGTGCTGGACTCTGAT |
| | | GGGAGTTTCTTTCTGTATTCTAAGCTGACCGTGGATAAAAGTAGGTGGC |
| | | AGCAGGGAAATGTCTTTAGTTGTTCAGTGATGCATGAAGCCCTGCATAA |
| | | CCACTACACCCAGAAAAGCCTGTCCCTGTCCCCCGGA |
| 188 | 10445 | EVQLVQSGAEVKKPGESLRISCKGSGYSFSTYWISWVRQMPGKGLEWMGK |
| | | IYPGDSYTNYSPSFQGQVTISADKSISTAYLQWSSLKASDTAMYYCARGYGI |
| | | FDYWGQGTLVTVSSASTKGPSVFPLAPSSKSTSGGTAALGCLVKDYFPEPV |
| | | TVSWNSGALTSGVHTFPAVLQSSGLYSLSSVVTVPSSSLGTQTYICNYNHKP |
| | | SNTKVDKKVEPKSCDKTHTCPPCPAPEAAGGPSVFLFPPKPKDTLMISRTPE |
| | | VTCVVVSVSHEDPEVKFNWYVDGVEVHNAKTKPREEQYNSTYRVVSVLT |
| | | VLHQDWLNGKEYKCKVSNKALPAPIEKTISKAKGQPREPQVYVLPPSRDEL |
| | | TKNQVSLLCLVKGFYPSDIAVEWESNGQPENNYLTWPPVLDSDGSFFLYSK |
| | | LTVDKSRWQQGNVFSCSVMHEALHNHYTQKSLSLSPGGGGGDIQMTQSPS |
| | | SLSASVGDRVTITCRASQDVNTAVAWYQQKPGKAPKLLIYSASFLYSGVPS |
| | | RFSGSRSGTDFTLTISSLQPEDFATYYCQQHYTTPPTFGQGTKVEIKGGSGG |
| | | GSGGGSGGGSGGGSGEVQLVESGGGLVQPGGSLRLSCAASGFNIKDTYIH |
| | | WVRQAPGKGLEWVARIYPTNGYTRYADSVKGRFTISADTSKNTAYLQMN |
| | | SLRAEDTAVYYCSRWGGDGFYAMDWGQGTLVTVSS |
| 189 | 10445 | GAGGTGCAGCTGGTGCAGTCCGGAGCAGAGGTGAAGAAGCCTGGCGAG |
| | | AGCCTGAGGATCTCCTGCAAGGGCTCTGGCTACTCCTTTTCTACCTATTG |
| | | GATCAGCTGGGTGCGCCAGATGCCAGGCAAGGGCCTGGAGTGGATGGG |
| | | CAAGATCTACCCTGGCGACTCCTACACAAACTATAGCCCATCCTTCCAG |
| | | GGCCAGGTGACCATCTCTGCCGATAAGTCTATCAGCACAGCCTATCTGC |
| | | AGTGGAGCTCCCTGAAGGCCTCCGACACCGCCATGTACTATTGCGCCAG |
| | | AGGCTACGGCATCTTTGATTATTGGGGCCAGGGCACCCTGGTGACAGTG |
| | | TCTAGCGCTAGCACAAAGGGCCCTTCCGTGTTCCCTCTGGCCCCATCCTC |
| | | TAAGTCCACCTCTGGAGGAACAGCCGCCCTGGGCTGTCTGGTGAAGGAC |
| | | TACTTTCCTGAGCCAGTGACCGTGTCTTGGAACAGCGGGGCCCTGACCA |
| | | GCGGAGTGCACACATTCCCCGCCGTGCTGCAGAGCTCCGGCCTGTACTC |
| | | CCTGTCTAGCGTGGTGACCGTGCCTTCCTCTAGCCTGGGCACCCAGACA |
| | | TATATCTGCAACGTGAATCACAAGCCATCCAATACAAAGGTCGACAAG |
| | | AAGGTGGAGCCCAAGTCTTGTGATAAGACCCACACATGCCCACCTTGTC |
| | | CGGCGCCAGAGGCCGCCGGAGGACCAAGCGTGTTCCTGTTTCCACCCAA |
| | | GCCTAAGGACACCCTGATGATCTCCAGGACCCCTGAGGTGACATGCGTG |
| | | GTGGTGAGCGTGTCCCACGAGGACCCAGAGGTGAAGTTTAACTGGTAC |
| | | GTGGATGGCGTGGAGGTGCACAATGCCAAGACCAAGCCCAGGGAGGAG |
| | | CAGTACAACTCTACCTATCGCGTGGTGAGCGTGCTGACAGTGCTGCACC |
| | | AGGATTGGCTGAACGGCAAGGAGTATAAGTGCAAGGTGTCTAATAAGG |
| | | CCCTGCCAGCCCCCATCGAGAAGACCATCAGCAAGGCCAAGGGCCAGC |
| | | CTCGCGAACCTCAGGTGTACGTGCTGCCTCCATCTAGAGACGAGCTGAC |
| | | AAAGAACCAGGTGAGCCTGCTGTGCCTGGTGAAGGGCTTTTATCCCAGC |
| | | GATATCGCCGTGGAGTGGGAGTCCAATGGCCAGCCTGAGAACAATTAC |
| | | CTGACCTGGCCCCCTGTGCTGGACTCCGATGGCTCTTTCTTTCTGTATTC |
| | | CAAGCTGACAGTGGACAAGTCTCGCTGGCAGCAGGGCAACGTGTTCTCT |
| | | TGCAGCGTGATGCACGAGGCCCTGCACAATCACTACACCCAGAAGTCCC |
| | | TGAGCTTAAGCCCAGGAGGAGGAGGAGGCGATATCCAGATGACACAGA |
| | | GCCCATCCTCTCTGTCCGCCTCTGTGGGCGACAGGGTGACCATCACATG |
| | | TCGCGCCTCCCAGGATGTGAATACCGCCGTGGCCTGGTATCAGCAGAAG |
| | | CCAGGCAAGGCCCCCAAGCTGCTGATCTACAGCGCCTCCTTCCTGTATA |
| | | GCGGCGTGCCATCCCGGTTTTCTGGCAGCAGATCCGGCACCGACTTCAC |
| | | CCTGACAATCAGCTCCCTGCAGCCCGAGGATTTTGCCACATACTATTGC |
| | | CAGCAGCACTACACCACACCACCCACCTTCGGCCAGGGCACAAAGGTG |
| | | GAGATCAAGGGAGGCTCTGGAGGAGGCAGCGGAGGAGGCTCCGGAGG |
| | | AGGCTCTGGCGGCGGCAGCGGCGAGGTGCAGCTGGTGGAGAGCGGCGG |
| | | CGGCCTGGTGCAGCCCGGCGGCTCCCTGCGGCTGTCTTGTGCCGCCAGC |
| | | GGCTTCAACATCAAGGACACCTACATCCACTGGGTGCGGCAGGCACCTG |
| | | GCAAGGGCCTGGAATGGGTGGCCAGAATCTATCCAACCAATGGCTACA |
| | | CACGGTATGCCGACAGCGTGAAGGGCCGGTTCACCATCTCCGCCGATAC |
| | | CTCTAAGAACACAGCCTACCTGCAGATGAATAGCCTGAGGGCCGAGGA |
| | | TACAGCCGTGTACTATTGCTCCAGATGGGGAGGCGACGGCTTCTACGCC |
| | | ATGGACTACTGGGGACAGGGCACCCTGGTCACAGTGTCTAGC |
| 190 | 21112 | EVQLVESGGGLIQPGGSLRLSCAASGFSLTTYAISWVRQAPGKGLEWYSIIW |
| | | PGGGTNYADSVKGRFTISRDNSKNTLYLQMNSLRAEDTAVYYCARGAGT |
| | | WYFDVWGQGTLVTVSSASTKGPSVFPLAPSSKSTSGGTAALGCLVKDYFPE |
| | | PVTVSWNSGALTSGVHTFPAVLQSSGLYSLSSVVTVPSSSLGTQTYICNVNH |
| | | KPSNTKVDKKVEPKSCDKTHTCPPCPAPEAAGGPSVFLFPPKPKDTLMISRT |
| | | PEVTCVVVSVSHEDPEVKFNWYVDGVEVHNAKTKPREEQYNSTYRVVSV |
| | | LTVLHQDWLNGKEYKCKVSNKALPAPIEKTISKAKGQPREPQVYTLPPSRD |
| | | ELTKNQVSLTCLVKGFYPSDIAVEWESNGQPENNYKTTPPVLDSDGSFFLY |
| | | SKLTVDKSRWQQGNVFSCSVMHEALHNHYTQKSLSLSPG |
| 191 | 21112 | GAGGTGCAGCTGGTGGAGTCCGGAGGAGGACTGATCCAGCCAGGAGGC |
| | | TCCCTGCGGCTGTCTTGCGCCGCCTCTGGCTTTAGCCTGACCACATACGC |
| | | CATCTCTTGGGTGAGACAGGCCCCCGGCAAGGGACTGGAGTGGGTGTCT |
| | | ATCATCTGGCCTGGCGGCGGCACAAACTACGCCGACAGCGTGAAGGGC |
| | | CGGTTCACCATCAGCAGAGATAACTCCAAGAATACACTGTATCTGCAGA |
| | | TGAATAGCCTGAGGGCCGAGGACACCGCCGTGTACTATTGTGCCCGGG |
| | | GGGCAGGGACATGGTATTTTGACGTGTGGGGCCAGGGCACCCTGGTGA |
| | | CAGTGAGCTCCGCTAGCACAAAGGGCCCCTCCGTGTTTCCTCTGGCCCC |
| | | ATCCTCTAAGTCCACCTCTGGAGGAACAGCCGCCCTGGGCTGTCTGGTG |
| | | AAGGATTACTTCCCTGAGCCAGTGACCGTGTCCTGGAACTCTGGGGCCC |
| | | TGACCAGCGGAGTGCACACATTTCCCGCCGTGCTGCAGAGCTCCGGACT |
| | | GTACTCCCTGTCTAGCGTGGTGACCGTGCCTTCCTCTAGCCTGGGCACCC |
| | | AGACATATATCTGCAACGTGAATCACAAGCCTTCCAATACAAAGGTCGA |
| | | CAAGAAGGTGGAGCCAAAGTCTTGTGATAAGACCCACACATGCCCACC |
| | | TTGTCCGGCGCCAGAGGCCGCCGGAGGACCAAGCGTGTTCCTGTTTCCA |
| | | CCCAAGCCCAAGGACACCCTGATGATCTCCCGGACCCCAGAGGTGACA |
| | | TGCGTGGTGGTGAGCGTGTCCCACGAGGACCCCGAGGTGAAGTTTAACT |
| | | GGTACGTGGATGGCGTGGAGGTGCACAATGCCAAGACAAAGCCCCGGG |
| | | AGGAGCAGTACAATTCTACCTATAGAGTGGTGAGCGTGCTGACAGTGCT |
| | | GCACCAGGATTGGCTGAACGGCAAGGAGTATAAGTGTAAGGTGAGCAA |
| | | TAAGGCCCTGCCAGCCCCCATCGAGAAGACCATCTCCAAGGCCAAGGG |
| | | CCAGCCTCGCGAACCACAGGTGTACACTCTGCCTCCATCTCGGGACGAG |
| | | CTGACTAAGAACCAGGTCAGTCTGACCTGTCTGGTGAAAGGATTCTATC |
| | | CCAGCGATATCGCTGTGGAGTGGGAATCCAATGGCCAGCCTGAGAACA |
| | | ATTACAAGACCACACCCCCTGTGCTGGACTCTGATGGCAGTTTCTTTCTG |
| | | TATAGTAAGCTGACCGTCGATAAATCACGATGGCAGCAGGGGAACGTG |
| | | TTCAGCTGTTCAGTGATGCACGAAGCCCTGCACAACCATTACACCCAGA |
| | | AGAGCCTGAGCCTGTCTCCCGGC |
| 192 | 21113 | EVQLVESGGGLIQPGGSLRLSCAVSGFSLTTYAISWVRQAPGKGLEWLGII |
| | | WPGGGTNYADSVKGRFTISRDNSKNTLYLQMNSLRAEDTAVYYCARGAG |
| | | TWYFDVWGQGTLVTVSSASTKGPSVFPLAPSSKSTSGGTAALGCLVKDYFP |
| | | EPVTVSWNSGALTSGVHTFPAVLQSSGLYSLSSVVTVPSSSLGTQTYICNVN |
| | | HKPSNTKVDKKVEPKSCDKTHTCPPCPAPEAAGGPSVFLFPPKPKDTLMISR |
| | | TPEVTCVVVSVSHEDPEVKFNWYVDGVEVHNAKTKPREEQYNSTYRVVS |
| | | VLTVLHQDWLNGKEYKCKVSNKALPAPIEKTISKAKGQPREPQVYTLPPSR |
| | | DELTKNQVSLTCLVKGFYPSDIAVEWESNGQPENNYKTTPPVLDSDGSFFL, |
| | | YSKLTVDKSRWQQGNVFSCSVMHEALHNHYTQKSLSLSPG |
| 193 | 21113 | GAGGTGCAGCTGGTGGAGTCCGGAGGAGGACTGATCCAGCCAGGAGGC |
| | | TCCCTGCGGCTGTCTTGCGCCGTGTCTGGCTTTAGCCTGACCACATACGC |
| | | CATCTCTTGGGTGAGACAGGCCCCCGGCAAGGGACTGGAGTGGCTGGG |
| | | AATCATCTGGCCTGGAGGAGGCACAAACTACGCCGACTCTGTGAAGGG |
| | | CCGGTTCACCATCAGCAGAGATAACTCCAAGAATACACTGTATCTGCAG |
| | | ATGAATAGCCTGAGGGCCGAGGACACCGCCGTGTACTATTGTGCCCGG |
| | | GGGGCAGGGACATGGTATTTTGACGTGTGGGGCCAGGGCACCCTGGTG |
| | | ACAGTGAGCTCCGCTAGCACAAAGGGCCCCTCCGTGTTTCCTCTGGCCC |
| | | CATCCTCTAAGTCCACCTCTGGAGGAACAGCCGCCCTGGGCTGTCTGGT |
| | | GAAGGATTACTTCCCTGAGCCAGTGACCGTGTCCTGGAACTCTGGGGCC |
| | | CTGACCAGCGGAGTGCACACATTTCCCGCCGTGCTGCAGAGCTCCGGAC |
| | | TGTACTCCCTGTCTAGCGTGGTGACCGTGCCTTCCTCTAGCCTGGGCACC |
| | | CAGACATATATCTGCAACGTGAATCACAAGCCTTCCAATACAAAGGTCG |
| | | ACAAGAAGGTGGAGCCAAAGTCTTGTGATAAGACCCACACATGCCCAC |
| | | CTTGTCCGGCGCCAGAGGCCGCCGGAGGACCAAGCGTGTTCCTGTTTCC |
| | | ACCCAAGCCCAAGGACACCCTGATGATCTCCCGGACCCCAGAGGTGAC |
| | | ATGCGTGGTGGTGAGCGTGTCCCACGAGGACCCCGAGGTGAAGTTTAA |
| | | CTGGTACGTGGATGGCGTGGAGGTGCACAATGCCAAGACAAAGCCCCG |
| | | GGAGGAGCAGTACAATTCTACCTATAGAGTGGTGAGCGTGCTGACAGT |
| | | GCTGCACCAGGATTGGCTGAACGGCAAGGAGTATAAGTGTAAGGTGAG |
| | | CAATAAGGCCCTGCCAGCCCCCATCGAGAAGACCATCTCCAAGGCCAA |
| | | GGGCCAGCCTCGCGAACCACAGGTGTACACTCTGCCTCCATCTCGGGAC |
| | | GAGCTGACTAAGAACCAGGTCAGTCTGACCTGTCTGGTGAAAGGATTCT |
| | | ATCCCAGCGATATCGCTGTGGAGTGGGAATCCAATGGCCAGCCTGAGA |
| | | ACAATTACAAGACCACACCCCCTGTGCTGGACTCTGATGGCAGTTTCTT |
| | | TCTGTATAGTAAGCTGACCGTCGATAAATCACGATGGCAGCAGGGGAA |
| | | CGTGTTCAGCTGTTCAGTGATGCACGAAGCCCTGCACAACCATTACACC |
| | | CAGAAGAGCCTGAGCCTGTCTCCCGGC |
| 194 | 21114 | EVQLVESGGGLIQPGGSLRLSCAVSGFSLTTYAISWVRQAPGKGLEWLGII |
| | | WPGGGTNYADSVKGRFTISKDNSKNTLYLQMNSLRAEDTAVYYCARGAG |
| | | TWYFDVWGQGTLVTVSSASTKGPSVFPLAPSSKSTSGGTAALGCLVKDYFP |
| | | EPVTVSWNSGALTSGVHTFPAVLQSSGLYSLSSVVTVPSSSLGTQTYICNVN |
| | | HKPSNTKVDKKVEPKSCDKTHTCPPCPAPEAAGGPSVFLFPPKPKDTLMISR |
| | | TPEVTCVVVSVSHEDPEVKFNWYVDGVEVHNAKTKPREEQYNSTYRVVS |
| | | VLTVLHQDWLNGKEYKCKVSNKALPAPIEKTISKAKGQPREPQVYTLPPSR |
| | | DELTKNQVSLTCLVKGFYPSDIAVEWESNGQPENNYKTTPPVLDSDGSFFL |
| | | YSKLTVDKSRWQQGNVFSCSVMHEALHNHYTQKSLSLSPG |
| 195 | 21114 | GAGGTGCAGCTGGTGGAGTCCGGCGGCGGCCTGATCCAGCCAGGAGGC |
| | | TCCCTGAGGCTGTCTTGCGCCGTGTCTGGCTTTAGCCTGACCACATACGC |
| | | AATCTCTTGGGTGCGCCAGGCCCCCGGCAAGGGACTGGAGTGGCTGGG |
| | | AATCATCTGGCCTGGAGGAGGCACAAACTACGCCGACTCTGTGAAGGG |
| | | CCGGTTCACCATCAGCAAGGATAACTCCAAGAATACACTGTATCTGCAG |
| | | ATGAATAGCCTGCGGGCAGAGGACACCGCCGTGTACTATTGTGCCCGG |
| | | GGGGCAGGGACATGGTATTTTGACGTGTGGGGCCAGGGCACCCTGGTG |
| | | ACAGTGAGCTCCGCTAGCACAAAGGGCCCCTCCGTGTTTCCTCTGGCCC |
| | | CATCCTCTAAGTCCACCTCTGGAGGAACAGCCGCCCTGGGCTGTCTGGT |
| | | GAAGGATTACTTCCCTGAGCCAGTGACCGTGTCCTGGAACTCTGGGGCC |
| | | CTGACCAGCGGAGTGCACACATTTCCCGCCGTGCTGCAGAGCTCCGGAC |
| | | TGTACTCCCTGTCTAGCGTGGTGACCGTGCCTTCCTCTAGCCTGGGCACC |
| | | CAGACATATATCTGCAACGTGAATCACAAGCCTTCCAATACAAAGGTCG |
| | | ACAAGAAGGTGGAGCCAAAGTCTTGTGATAAGACCCACACATGCCCAC |
| | | CTTGTCCGGCGCCAGAGGCCGCCGGAGGACCAAGCGTGTTCCTGTTTCC |
| | | ACCCAAGCCCAAGGACACCCTGATGATCTCCCGGACCCCAGAGGTGAC |
| | | ATGCGTGGTGGTGAGCGTGTCCCACGAGGACCCCGAGGTGAAGTTTAA |
| | | CTGGTACGTGGATGGCGTGGAGGTGCACAATGCCAAGACAAAGCCCCG |
| | | GGAGGAGCAGTACAATTCTACCTATAGAGTGGTGAGCGTGCTGACAGT |
| | | GCTGCACCAGGATTGGCTGAACGGCAAGGAGTATAAGTGTAAGGTGAG |
| | | CAATAAGGCCCTGCCAGCCCCCATCGAGAAGACCATCTCCAAGGCCAA |
| | | GGGCCAGCCTCGCGAACCACAGGTGTACACTCTGCCTCCATCTCGGGAC |
| | | GAGCTGACTAAGAACCAGGTCAGTCTGACCTGTCTGGTGAAAGGATTCT |
| | | ATCCCAGCGATATCGCTGTGGAGTGGGAATCCAATGGCCAGCCTGAGA |
| | | ACAATTACAAGACCACACCCCCTGTGCTGGACTCTGATGGCAGTTTCTT |
| | | TCTGTATAGTAAGCTGACCGTCGATAAATCACGATGGCAGCAGGGGAA |
| | | CGTGTTCAGCTGTTCAGTGATGCACGAAGCCCTGCACAACCATTACACC |
| | | CAGAAGAGCCTGAGCCTGTCTCCCGGC |
| 196 | 4560 | EPKSSDKTHTCPPCPAPELLGGPSVFLFPPKPKDTLMISRTPEVTCVVVDVS |
| | | HEDPEVKFNWYVDGVEVHNAKTKPREEQYNSTYRVVSVLTVLHQDWLN |
| | | GKEYKCKVSNKALPAPIEKTISKAKGQPREPQVYVLPPSRDELTKNQVSLL |
| | | CLVKGFYPSDIAVEWESNGQPENNYLTWPPVLDSDGSFFLYSKLTVDKSR |
| | | WQQGNVFSCSVMHEALHNHYTQKSLSLSPGK |
| 197 | 4560 | GAACCTAAAAGCAGCGACAAGACCCACACATGCCCCCCTTGTCCAGCTC |
| | | CAGAACTGCTGGGAGGACCAAGCGTGTTCCTGTTTCCACCCAAGCCCAA |
| | | AGATACACTGATGATCAGCCGAACTCCCGAGGTCACCTGCGTGGTCGTG |
| | | GACGTGTCCCACGAGGACCCCGAAGTCAAGTTCAACTGGTACGTGGAC |
| | | GGCGTCGAAGTGCATAATGCAAAGACTAAACCACGGGAGGAACAGTAC |
| | | AACTCTACATATAGAGTCGTGAGTGTCCTGACTGTGCTGCATCAGGATT |
| | | GGCTGAACGGCAAAGAGTATAAGTGCAAAGTGTCTAATAAGGCCCTGC |
| | | CTGCTCCAATCGAGAAAACTATTAGTAAGGCAAAAGGGCAGCCCAGGG |
| | | AACCTCAGGTCTACGTGCTGCCTCCAAGTCGCGACGAGCTGACCAAGAA |
| | | CCAGGTCTCACTGCTGTGTCTGGTGAAAGGATTCTATCCTTCCGATATTG |
| | | CCGTGGAGTGGGAATCTAATGGCCAGCCAGAGAACAATTACCTGACCT |
| | | GGCCCCCTGTGCTGGACAGCGATGGGTCCTTCTTTCTGTATTCAAAGCT |
| | | GACAGTGGACAAAAGCAGATGGCAGCAGGGAAACGTCTTTAGCTGTTC |
| | | CGTGATGCACGAAGCCCTGCACAATCATTACACCCAGAAGTCTCTGAGT |
| | | CTGTCACCTGGCAAA |
| 198 | 21115 | EVQLVESGGGLIQPGGSLRISCAVSGFSLTTYAISWVRQAPGKGLEWLGIIW |
| | | PGGGTNYADSLKGRLTISKDNSKNTVYLQMNSLRTEDTAVYYCARGAGT |
| | | WYFDVWGQGTLVTVSSASTKGPSVFPLAPSSKSTSGGTAALGCLVKDYFPE |
| | | PVTVSWNSGALTSGVHTFPAVLQSSGLYSLSSVVTVPSSSLGTQTYICNVNH |
| | | KPSNTKVDKKVEPKSCDKTHTCPPCPAPEAAGGPSVFLFPPKPKDTLMISRT |
| | | PEVTCVVVSVSHEDPEVKFNWYVDGVEVHNAKTKPREEQYNSTYRVVSV |
| | | LTVLHQDWLNGKEYKCKVSNKALPAPIEKTISKAKGQPREPQVYTLPPSRD |
| | | ELTKNQVSLTCLVKGFYPSDIAVEWESNGQPENNYKTTPPVLDSDGSFFLY |
| | | SKLTVDKSRWQQGNVFSCSVMHEALHNHYTQKSLSLSPG |
| 199 | 21115 | GAGGTGCAGCTGGTGGAGTCCGGCGGCGGCCTGATCCAGCCAGGAGGC |
| | | TCCCTGAGGATCTCTTGCGCCGTGTCTGGCTTTAGCCTGACCACATACGC |
| | | AATCTCTTGGGTGCGCCAGGCCCCCGGCAAGGGACTGGAGTGGCTGGG |
| | | AATCATCTGGCCTGGAGGAGGAACCAACTACGCAGACTCTCTGAAGGG |
| | | CAGACTGACCATCAGCAAGGATAACTCCAAGAATACAGTGTATCTGCA |
| | | GATGAATAGCCTGCGGACCGAGGACACAGCCGTGTACTATTGTGCCCG |
| | | GGGGGCAGGGACATGGTATTTCGACGTGTGGGGACAGGGCACCCTGGT |
| | | GACAGTGAGCTCCGCTAGCACAAAGGGCCCCTCCGTGTTTCCTCTGGCC |
| | | CCATCCTCTAAGTCCACCTCTGGAGGAACAGCCGCCCTGGGCTGTCTGG |
| | | TGAAGGATTACTTCCCTGAGCCAGTGACCGTGTCCTGGAACTCTGGGGC |
| | | CCTGACCAGCGGAGTGCACACATTTCCCGCCGTGCTGCAGAGCTCCGGA |
| | | CTGTACTCCCTGTCTAGCGTGGTGACCGTGCCTTCCTCTAGCCTGGGCAC |
| | | CCAGACATATATCTGCAACGTGAATCACAAGCCTTCCAATACAAAGGTC |
| | | GACAAGAAGGTGGAGCCAAAGTCTTGTGATAAGACCCACACATGCCCA |
| | | CCTTGTCCGGCGCCAGAGGCCGCCGGAGGACCAAGCGTGTTCCTGTTTC |
| | | CACCCAAGCCCAAGGACACCCTGATGATCTCCCGGACCCCAGAGGTGA |
| | | CATGCGTGGTGGTGAGCGTGTCCCACGAGGACCCCGAGGTGAAGTTTA |
| | | ACTGGTACGTGGATGGCGTGGAGGTGCACAATGCCAAGACAAAGCCCC |
| | | GGGAGGAGCAGTACAATTCTACCTATAGAGTGGTGAGCGTGCTGACAG |
| | | TGCTGCACCAGGATTGGCTGAACGGCAAGGAGTATAAGTGTAAGGTGA |
| | | GCAATAAGGCCCTGCCAGCCCCCATCGAGAAGACCATCTCCAAGGCCA |
| | | AGGGCCAGCCTCGCGAACCACAGGTGTACACTCTGCCTCCATCTCGGGA |
| | | CGAGCTGACTAAGAACCAGGTCAGTCTGACCTGTCTGGTGAAAGGATTC |
| | | TATCCCAGCGATATCGCTGTGGAGTGGGAATCCAATGGCCAGCCTGAGA |
| | | ACAATTACAAGACCACACCCCCTGTGCTGGACTCTGATGGCAGTTTCTT |
| | | TCTGTATAGTAAGCTGACCGTCGATAAATCACGATGGCAGCAGGGGAA |
| | | CGTGTTCAGCTGTTCAGTGATGCACGAAGCCCTGCACAACCATTACACC |
| | | CAGAAGAGCCTGAGCCTGTCTCCCGGC |
| 200 | 18556 | QVQLKESGPGLVAPSQSLSITCTVSGFSLTSYAISWVRQPPGKGLEWLGVIW |
| | | PGGGTNYNSALKSRLSISKDNSKSQVFLKMNSLQTDDTARYYCARGTGTW |
| | | YFDVWGAGTTVTVSSASTKGPSVFPLAPSSKSTSGGTAALGCLVKDYFPEP |
| | | VTVSWNSGALTSGVHTFPAVLQSSGLYSLSSVVTVPSSSLGTQTYICNVNH |
| | | KPSNTKVDKKVEPKSCDKTHTCPPCPAPEAAGGPSVFLFPPKPKDTLMISRT |
| | | PEVTCVVVSVSHEDPEVKFNWYVDGVEVHNAKTKPREEQYNSTYRVVSV |
| | | LTVLHQDWLNGKEYKCKVSNKALPAPIEKTISKAKGQPREPQVYVYPPSRD |
| | | ELTKNQVSLTCLVKGFYPSDIAVEWESNGQPENNYKTTPPVLDSDGSFALV |
| | | SKLTVDKSRWQQGNVFSCSVMHEALHNHYTQKSLSLSPGGGGGDIVMTQ |
| | | TPASVEAAVGGTVTIKCQASQSIYSSLAWYQQKPGQSPKLLIYDASHLASG |
| | | VPSRFSGSRYGTEFTLTISGVQCDDAATYYCQGGWYSSAATYVPNTFGGGT |
| | | EVVVKGGGGSGGGGSGGGGSQEQLVESGGGLVQPEGSLTLTCKASGFTIS |
| | | NNYYMCWVRQAPGKGLEWIACIYGGISGRTYYASWAKGRFTISKTSSTTV |
| | | TLQMTSLTAADTATYFCVRGYVGTSNLWGPGTLVTVSS |
| 201 | 18556 | CAGGTGCAGCTGAAGGAGTCTGGACCAGGACTGGTGGCCCCCTCTCAG |
| | | AGCCTGTCCATCACCTGCACAGTGAGCGGCTTTTCCCTGACCTCTTACGC |
| | | AATCTCCTGGGTGCGGCAGCCACCTGGCAAGGGACTGGAGTGGCTGGG |
| | | CGTGATCTGGCCAGGAGGAGGCACAAACTATAATAGCGCCCTGAAGTC |
| | | CAGGCTGTCTATCAGCAAGGACAACTCCAAGTCTCAGGTGTTCCTGAAG |
| | | ATGAATAGCCTGCAGACCGACGATACAGCCCGGTACTATTGTGCCAGA |
| | | GGCACCGGCACATGGTACTTTGACGTGTGGGGGGCAGGGACCACAGTG |
| | | ACAGTGAGCTCCGCTAGCACAAAGGGCCCCTCCGTGTTTCCTCTGGCCC |
| | | CATCCTCTAAGTCCACCTCTGGAGGAACAGCCGCCCTGGGCTGTCTGGT |
| | | GAAGGATTACTTCCCTGAGCCAGTGACCGTGTCCTGGAACTCTGGGGCC |
| | | CTGACCAGCGGAGTGCACACATTTCCCGCCGTGCTGCAGAGCTCCGGAC |
| | | TGTACTCCCTGTCTAGCGTGGTGACCGTGCCTTCCTCTAGCCTGGGCACC |
| | | CAGACATATATCTGCAACGTGAATCACAAGCCTTCCAATACAAAGGTCG |
| | | ACAAGAAGGTGGAGCCAAAGTCTTGTGATAAGACCCACACATGCCCAC |
| | | CTTGTCCGGCGCCAGAGGCCGCCGGAGGACCAAGCGTGTTCCTGTTTCC |
| | | ACCCAAGCCCAAGGACACCCTGATGATCTCCCGGACCCCAGAGGTGAC |
| | | ATGCGTGGTGGTGAGCGTGTCCCACGAGGACCCCGAGGTGAAGTTTAA |
| | | CTGGTACGTGGATGGCGTGGAGGTGCACAATGCCAAGACAAAGCCCCG |
| | | GGAGGAGCAGTACAATTCTACCTATAGAGTGGTGAGCGTGCTGACAGT |
| | | GCTGCACCAGGATTGGCTGAACGGCAAGGAGTATAAGTGTAAGGTGAG |
| | | CAATAAGGCCCTGCCAGCCCCCATCGAGAAGACCATCTCCAAGGCCAA |
| | | GGGCCAGCCTCGCGAGCCACAGGTGTACGTGTATCCCCCTAGCAGGGA |
| | | CGAGCTGACAAAGAACCAGGTGTCCCTGACCTGCCTGGTGAAGGGCTTC |
| | | TACCCCTCCGATATCGCCGTGGAGTGGGAGTCTAATGGCCAGCCTGAGA |
| | | ACAATTATAAGACCACACCACCCGTGCTGGACTCTGATGGCAGCTTCGC |
| | | CCTGGTGAGCAAGCTGACAGTGGACAAGTCCAGATGGCAGCAGGGCAA |
| | | CGTGTTTTCTTGCAGCGTGATGCACGAGGCCCTGCACAATCACTACACC |
| | | CAGAAGTCCCTGTCTCTGAGCCCAGGAGGAGGAGGAGGCGATATCGTG |
| | | ATGACCCAGACACCCGCCTCCGTGGAGGCCGCCGTGGGAGGAACCGTG |
| | | ACAATCAAGTGTCAGGCCTCCCAGTCTATCTACAGCTCCCTGGCCTGGT |
| | | ATCAGCAGAAGCCTGGCCAGAGCCCAAAGCTGCTGATCTACGACGCCT |
| | | CCCACCTGGCCTCTGGAGTGCCAAGCCGGTTCAGCGGCTCCAGATATGG |
| | | CACAGAGTTTACCCTGACAATCTCCGGAGTGCAGTGCGACGATGCAGCA |
| | | ACCTACTATTGTCAGGGAGGATGGTACTCTAGCGCCGCCACCTATGTGC |
| | | CTAACACATTCGGCGGCGGCACCGAGGTGGTGGTGAAGGGAGGAGGAG |
| | | GCTCCGGCGGAGGAGGCTCTGGCGGCGGCGGCAGCCAGGAGCAGCTGG |
| | | TGGAGTCTGGAGGAGGACTGGTGCAGCCTGAGGGCAGCCTGACCCTGA |
| | | CATGCAAGGCCTCCGGCTTTACCATCTCTAACAATTACTATATGTGCTG |
| | | GGTGCGGCAGGCCCCAGGCAAGGGACTGGAGTGGATCGCCTGCATCTA |
| | | CGGCGGCATCTCTGGCAGGACATACTATGCCAGCTGGGCCAAGGGCCG |
| | | CTTCACCATCTCCAAGACATCCTCTACCACAGTGACCCTGCAGATGACC |
| | | TCTCTGACAGCCGCCGATACCGCCACATACTTTTGCGTGCGGGGCTATG |
| | | TGGGCACCAGCAATCTGTGGGGCCCTGGCACCCTGGTGACAGTGAGCTC |
| | | C |
| 202 | 11011 | QVTLRESGPALVKPTQTLTLTCTFSGFSLSTSGMSVGWIRQPPGKALEWLA |
| | | DIWWDDKKDYNPSLKSRLTISKDTSKNQVVLKVTNMDPADTATYYCARS |
| | | MITNWYFDVWGAGTTVTVSSASTKGPSVFPLAPSSKSTSGGTAALGCLVK |
| | | DYFPEPVTVSWNSGALTSGVHTFPAVLQSSGLYSLSSVVTVPSSSLGTQTYI |
| | | CNVNHKPSNTKVDKKVEPKSCDKTHTCPPCPAPEAAGGPSVFLFPPKRKDT |
| | | LMISRTPEVTCVVVSVSHEDPEVKFNWYVDGVEVHNAKTKPREEQYNSTY |
| | | RVVSVLTVLHQDWLNGKEYKCKVSNKALPAPIEKTISKAKGQPREPQVYV |
| | | YPPSRDELTKNQVSLTCLVKGFYPSDIAVEWESNGQPENNYKTTPPVLDSD |
| | | GSFALVSKLTVDKSRWQQGNVFSCSVMHEALHNHYTQKSLSLSPG |
| 203 | 11011 | CAGGTGACACTGAGGGAGAGCGGACCAGCCCTGGTGAAGCCAACCCAG |
| | | ACACTGACCCTGACATGCACCTTCTCCGGCTTTAGCCTGTCCACATCTGG |
| | | CATGTCTGTGGGCTGGATCAGACAGCCACCTGGCAAGGCCCTGGAGTG |
| | | GCTGGCCGACATCTGGTGGGACGATAAGAAGGATTACAACCCTAGCCT |
| | | GAAGTCCAGACTGACAATCTCTAAGGACACCAGCAAGAACCAGGTGGT |
| | | GCTGAAGGTGACCAATATGGACCCCGCCGATACAGCCACCTACTATTGT |
| | | GCCCGGTCCATGATTACTAACTGGTATTTTGATGTCTGGGGGGCAGGAA |
| | | CAACCGTGACCGTCTCTTCTGCTAGCACTAAGGGGCCTTCCGTGTTTCCA |
| | | CTGGCTCCCTCTAGTAAATCCACCTCTGGAGGCACAGCTGCACTGGGAT |
| | | GTCTGGTGAAGGATTACTTCCCTGAACCAGTCACAGTGAGTTGGAACTC |
| | | AGGGGCTCTGACAAGTGGAGTCCATACTTTTCCCGCAGTGCTGCAGTCA |
| | | AGCGGACTGTACTCCCTGTCCTCTGTGGTCACCGTGCCTAGTTCAAGCCT |
| | | GGGCACCCAGACATATATCTGCAACGTGAATCACAAGCCATCAAATAC |
| | | AAAAGTCGACAAGAAAGTGGAGCCCAAGAGCTGTGATAAAACTCATAC |
| | | CTGCCCACCTTGTCCGGCGCCAGAGGCTGCAGGAGGACCAAGCGTGTTC |
| | | CTGTTTCCACCCAAGCCTAAAGACACACTGATGATTTCCCGAACCCCCG |
| | | AAGTCACATGCGTGGTCGTGTCTGTGAGTCACGAGGACCCTGAAGTCAA |
| | | GTTCAACTGGTACGTGGATGGCGTCGAGGTGCATAATGCCAAGACTAA |
| | | ACCTAGGGAGGAACAGTACAACTCAACCTATCGCGTCGTGAGCGTCCTG |
| | | ACAGTGCTGCACCAGGATTGGCTGAACGGCAAAGAATATAAGTGCAAA |
| | | GTGAGCAATAAGGCCCTGCCCGCTCCTATCGAGAAAACCATTTCCAAGG |
| | | CTAAAGGGCAGCCTCGCGAACCACAGGTCTACGTGTATCCTCCAAGCCG |
| | | GGACGAGCTGACAAAGAACCAGGTCTCCCTGACTTGTCTGGTGAAAGG |
| | | GTTTTACCCTAGTGATATCGCTGTGGAGTGGGAATCAAATGGACAGCCA |
| | | GAGAACAATTATAAGACTACCCCCCCTGTGCTGGACAGTGATGGGTCAT |
| | | TCGCACTGGTCTCCAAGCTGACAGTGGACAAATCTCGGTGGCAGCAGG |
| | | GAAATGTCTTTTCATGTAGCGTGATGCATGAAGCACTGCACAACCATTA |
| | | CACCCAGAAGTCACTGTCACTGTCACCAGGA |
| 204 | 2871 | EVQLVQSGAEVKKPGESLRISCKGSGYSFSTYWISWVRQMPGKGLEWMGK |
| | | IYPGDSYTNYSPSFQGQVTISADKSISTAYLQWSSLKASDTAMYYCARGYGI |
| | | FDYWGQGTLVTVSSASTKGPSVFPLAPCSRSTSESTAALGCLVKDYFPEPVT |
| | | VSWNSGALTSGVHTFPAVLQSSGLYSLSSVVTVPSSNFGTQTYTCNVDHKP |
| | | SNTKVDKTVEPKSCDKTHTCPPCPAPELLGGPSVFLFPPKPKDTLMISRTPE |
| | | VTCVVVDVSHEDPEVKFNWYVDGVEVHNAKTKPREEQYNSTYRVVSVLT |
| | | VLHQDWLNGKEYKCKVSNKALPAPIEKTISKAKGQPREPQVYVYPPSRDEL |
| | | TKNQVSLTCLVKGFYPSDIAVEWESNGQPENNYKTTPPVLDSDGSFALVSK |
| | | LTVDKSRWQQGNVFSCSVMHEALHNHYTQKSLSLSPGK |
| 205 | 2871 | GAAGTGCAGCTGGTCCAGTCCGGAGCCGAGGTGAAGAAACCCGGCGAA |
| | | TCACTGCGAATCAGCTGCAAGGGCAGCGGCTACAGCTTCTCCACATATT |
| | | GGATTAGCTGGGTGCGGCAGATGCCTGGGAAGGGACTGGAGTGGATGG |
| | | GGAAAATCTACCCCGGAGATAGCTACACTAACTATTCTCCTAGTTTTCA |
| | | GGGCCAGGTGACCATCTCCGCCGACAAGTCAATTAGCACAGCTTATCTG |
| | | CAGTGGAGCTCCCTGAAAGCTAGCGATACCGCAATGTACTATTGTGCCA |
| | | GAGGCTACGGGATTTTCGACTATTGGGGACAGGGCACACTGGTCACTGT |
| | | GTCTAGTGCTTCTACAAAGGGGCCCAGTGTGTTTCCACTGGCACCCTGC |
| | | TCCAGGTCTACCAGTGAATCAACAGCCGCTCTGGGATGTCTGGTGAAAG |
| | | ATTACTTCCCAGAGCCCGTCACTGTGAGCTGGAACTCCGGCGCACTGAC |
| | | ATCTGGGGTCCACACTTTTCCTGCCGTGCTGCAGTCAAGCGGCCTGTAC |
| | | AGCCTGTCCTCTGTGGTCACCGTGCCAAGTTCAAATTTCGGGACTCAGA |
| | | CCTATACATGCAACGTGGACCACAAGCCTTCTAATACCAAGGTCGATAA |
| | | AACAGTGGAACCAAAGAGTTGTGACAAAACTCATACCTGCCCCCCTTGT |
| | | CCTGCTCCAGAGCTGCTGGGAGGACCATCCGTGTTCCTGTTTCCACCCA |
| | | AGCCCAAAGATACACTGATGATCAGCCGCACTCCAGAAGTGACCTGCG |
| | | TGGTCGTGGACGTGTCCCACGAGGACCCCGAAGTCAAGTTTAACTGGTA |
| | | CGTGGACGGCGTCGAGGTGCATAATGCCAAGACCAAACCACGGGAGGA |
| | | ACAGTACAATTCAACATATAGAGTCGTGAGCGTCCTGACTGTGCTGCAC |
| | | CAGGATTGGCTGAACGGCAAGGAGTATAAGTGCAAAGTGTCTAATAAG |
| | | GCACTGCCCGCCCCTATCGAGAAAACCATTAGCAAGGCAAAAGGGCAG |
| | | CCTAGGGAACCACAGGTCTACGTGTATCCTCCAAGCCGCGATGAGCTGA |
| | | CTAAGAACCAGGTCTCCCTGACCTGTCTGGTGAAAGGGTTCTACCCCAG |
| | | TGACATTGCCGTGGAGTGGGAATCAAATGGACAGCCTGAAAACAATTA |
| | | TAAGACCACACCCCCTGTGCTGGACTCTGATGGAAGTTTCGCCCTGGTC |
| | | TCCAAGCTGACTGTGGACAAATCTCGATGGCAGCAGGGCAACGTCTTTA |
| | | GCTGTTCCGTGATGCATGAGGCTCTGCACAATCATTACACCCAGAAGTC |
| | | TCTGAGTCTGTCACCTGGCAAA |
| 206 | 2872 | SYELTQPPSVSVSPGQTASITCSGDNIGDQYAHWYQQKPGQSPVLVIYQDK |
| | | NRPSGIPERFSGSNSGNTATLTISGTQAMDEADYYCATYTGFGSLAVFGGG |
| | | TKLTVLGQPKAAPSVTLFPPSSEELQANKATLYCLISDFYPGAVTVAWKAD |
| | | SSPVKAGVETTTPSKQSNNKYAASSYLSITPEQWKSHRSYSCQVTHEGSTV |
| | | EKTVAPTECS |
| 207 | 2872 | TCCTATGAACTGACCCAGCCCCCTTCCGTGTCTGTCAGTCCAGGGCAGA |
| | | CAGCCTCCATCACTTGCTCTGGAGACAACATTGGCGATCAGTACGCTCA |
| | | CTGGTATCAGCAGAAGCCTGGCCAGTCTCCAGTGCTGGTCATCTACCAG |
| | | GACAAAAATCGGCCCAGTGGGATTCCTGAGAGATTCTCAGGGAGCAAC |
| | | TCCGGAAATACCGCCACACTGACTATCAGCGGGACACAGGCAATGGAC |
| | | GAAGCCGATTACTATTGCGCTACCTATACAGGCTTCGGGTCCCTGGCAG |
| | | TGTTTGGCGGGGGAACTAAGCTGACCGTGCTGGGACAGCCAAAAGCCG |
| | | CTCCCTCTGTGACCCTGTTCCCACCCAGCTCCGAGGAACTGCAGGCTAA |
| | | CAAGGCAACCCTGTACTGTCTGATCAGCGACTTTTATCCTGGAGCAGTG |
| | | ACAGTCGCCTGGAAGGCTGATTCTAGTCCTGTGAAAGCTGGCGTCGAGA |
| | | CCACAACTCCATCAAAGCAGAGCAACAACAAGTACGCAGCCTCAAGCT |
| | | ATCTGAGTATTACTCCCGAACAGTGGAAGTCACACAGGTCTTACAGTTG |
| | | CCAGGTGACCCATGAGGGCAGCACCGTGGAAAAAACAGTCGCCCCTAC |
| | | TGAGTGTTCC |
| 208 | 11074 | DIQMTQSPSTLSASVGDRVTITCKCQLSVGYMHWYQQKPGKAPKLLIYDTS |
| | | KLASGVPSRFSGSGSGTEFTLTISSLQPDDFATYYCFQGSGYPFTFGGGTKLE |
| | | IKRTVAAPSVFIFPPSDEQLKSGTASVVCLLNNFYPREAKVQWKVDNALQS |
| | | GNSQESVTEQDSKDSTYSLSSTLTLSKADYEKHKVYACEVTHQGLSSPVTK |
| | | SFNRGEC |
| 209 | 11074 | GATATTCAGATGACCCAGTCTCCCAGCACACTGTCCGCCTCTGTGGGCG |
| | | ACCGGGTGACCATCACATGCAAGTGTCAGCTGAGCGTGGGCTACATGC |
| | | ACTGGTATCAGCAGAAGCCCGGCAAGGCCCCTAAGCTGCTGATCTACG |
| | | ATACCAGCAAGCTGGCCTCCGGCGTGCCATCTAGATTCAGCGGCTCCGG |
| | | CTCTGGCACCGAGTTTACCCTGACAATCAGCTCCCTGCAGCCCGACGAT |
| | | TTCGCCACATACTATTGCTTTCAGGGGAGCGGCTACCCATTCACATTCG |
| | | GAGGGGGAACTAAACTGGAAATCAAGAGGACCGTCGCGGCGCCCAGTG |
| | | TCTTCATTTTTCCCCCTAGCGACGAACAGCTGAAGTCTGGGACAGCCAG |
| | | TGTGGTCTGTCTGCTGAACAACTTCTACCCTAGAGAGGCTAAAGTGCAG |
| | | TGGAAGGTCGATAACGCACTGCAGTCCGGAAATTCTCAGGAGAGTGTG |
| | | ACTGAACAGGACTCAAAAGATAGCACCTATTCCCTGTCAAGCACACTGA |
| | | CTCTGAGCAAGGCCGACTACGAGAAGCATAAAGTGTATGCTTGTGAAG |
| | | TCACCCACCAGGGGCTGAGTTCACCAGTCACAAAATCATTCAACAGAG |
| | | GGGAGTGC |
| 210 | 11082 | QVTLRESGPALVKPTQTLTLTCTFSGFSLSTSGMSVGWIRQPPGKALEWLA |
| | | DIWWDDKKDYNPSLKSRLTISKDTSKNQVVLKVTNMDPADTATYYCARS |
| | | MITNWYFDVWGAGTTVTVSSVEGGSGGSGGSGGSGGVDDIQMTQSPSTLS |
| | | ASVGDRVTITCKCQLSVGYMHWYQQKPGKAPKLLIYDTSKLASGVPSRFS |
| | | GSGSGTEFTLTISSLQPDDFATYYCFQGSGYPFTFGGGTKLEIKAAEPKSSDK |
| | | THTCPPCPAPEAAGGPSVFLFPPKPKDTLMISRTPEVTCVVVSVSHEDPEVK |
| | | FNWYVDGVEVHNAKTKPREEQYNSTYRVVSVLTVLHQDWLNGKEYKCK |
| | | VSNKALPAPIEKTISKAKGQPREPQVYVLPPSRDELTKNQVSLLCLVKGFYP |
| | | SDIAVEWESNGQPENNYLTWPPVLDSDGSFFLYSKLTVDKSRWQQGNVFS |
| | | CSVMHEALHNHYTQKSLSLSPG |
| 211 | 11082 | CAGGTGACCCTGAGAGAGAGCGGACCCGCCCTGGTGAAGCCTACCCAG |
| | | ACACTGACCCTGACATGCACCTTCAGCGGCTTTAGCCTGTCCACCTCTG |
| | | GCATGTCCGTGGGATGGATCAGGCAGCCACCTGGCAAGGCCCTGGAGT |
| | | GGCTGGCCGACATCTGGTGGGACGATAAGAAGGATTACAACCCTTCCCT |
| | | GAAGTCTCGCCTGACAATCTCCAAGGACACCTCTAAGAACCAGGTGGTG |
| | | CTGAAGGTGACCAATATGGACCCAGCCGATACAGCCACCTACTATTGTG |
| | | CCCGGTCCATGATCACAAATTGGTATTTCGACGTGTGGGGAGCCGGAAC |
| | | CACAGTGACCGTGAGCTCCGTGGAGGGAGGCAGCGGAGGCTCCGGAGG |
| | | CTCTGGAGGCAGCGGAGGAGTGGACGATATCCAGATGACACAGAGCCC |
| | | CTCCACCCTGTCTGCCAGCGTGGGCGACCGGGTGACAATCACCTGCAAG |
| | | TGTCAGCTGTCCGTGGGCTACATGCACTGGTATCAGCAGAAGCCTGGCA |
| | | AGGCCCCAAAGCTGCTGATCTACGATACCAGCAAGCTGGCCTCCGGCGT |
| | | GCCTTCTAGGTTCTCCGGCTCTGGCAGCGGCACAGAGTTTACACTGACC |
| | | ATCTCTAGCCTGCAGCCAGACGATTTCGCCACCTACTATTGCTTTCAGG |
| | | GCAGCGGCTATCCCTTCACATTTGGCGGCGGCACCAAGCTGGAGATCAA |
| | | GGCCGCCGAGCCTAAGTCCTCTGACAAGACACACACCTGCCCACCCTGT |
| | | CCGGCGCCAGAGGCAGCAGGAGGACCAAGCGTGTTCCTGTTTCCACCC |
| | | AAGCCCAAAGACACCCTGATGATTAGCCGAACCCCTGAAGTCACATGC |
| | | GTGGTCGTGTCCGTGTCTCACGAGGACCCAGAAGTCAAGTTCAACTGGT |
| | | ACGTGGATGGCGTCGAGGTGCATAATGCCAAGACAAAACCCCGGGAGG |
| | | AACAGTACAACAGCACCTATAGAGTCGTGTCCGTCCTGACAGTGCTGCA |
| | | CCAGGATTGGCTGAACGGCAAGGAATATAAGTGCAAAGTGTCCAATAA |
| | | GGCCCTGCCCGCTCCTATCGAGAAAACCATTTCTAAGGCAAAAGGCCAG |
| | | CCTCGCGAACCACAGGTCTACGTGCTGCCTCCATCCCGGGACGAGCTGA |
| | | CAAAGAACCAGGTCTCTCTGCTGTGCCTGGTGAAAGGCTTCTATCCATC |
| | | AGATATTGCTGTGGAGTGGGAAAGCAATGGGCAGCCCGAGAACAATTA |
| | | CCTGACTTGGCCCCCTGTGCTGGACTCTGATGGGAGTTTCTTTCTGTATT |
| | | CTAAGCTGACCGTGGATAAAAGTAGGTGGCAGCAGGGAAATGTCTTTA |
| | | GTTGTTCAGTGATGCATGAAGCCCTGCATAACCACTACACCCAGAAAAG |
| | | CCTGTCCCTGTCCCCCGGA |
| 212 | 8021 | EVQLVQSGAEVKKPGESLRISCKGSGYSFSTYWISWVRQMPGKGLEWMGK |
| | | IYPGDSYTNYSPSFQGQVTISADKSISTAYLQWSSLKASDTAMYYCARGYGI |
| | | FDYWGQGTLVTVSSASTKGPSVFPLAPSSKSTSGGTAALGCLVKDYFPEPV |
| | | TVSWNSGALTSGVHTFPAVLQSSGLYSLSSVVTVPSSSLGTQTYICNVNHKP |
| | | SNTKVDKKVEPKSCDKTHTCPPCPAPELLGGPSVFLFPPKPKDTLIMSRTPE |
| | | VTCVVVDVSHEDPEVKFNWYVDGVEVHNAKTKPREEQYNSTYRVVSVLT |
| | | VLHQDWLNGKEYKCKVSNKALPAPIEKTISKAKGQPREPQVYVYPPSRDEL |
| | | TKNQVSLTCLVKGFYPSDIAVEWESNGQPENNYKTTPPVLDSDGSFALVSK |
| | | LTVDKSRWQQGNVFSCSVMHEALHNHYTQKSLSLSPG |
| 213 | 8021 | GAGGTCCAGCTGGTGCAGAGTGGCGCTGAGGTCAAGAAACCAGGGGAA |
| | | AGTCTGCGGATCTCATGCAAGGGCAGCGGGTACTCTTTCAGTACTTATT |
| | | GGATTTCTTGGGTGAGACAGATGCCCGGAAAGGGCCTGGAGTGGATGG |
| | | GGAAAATCTACCCCGGAGACTCCTACACCAACTATTCACCTAGCTTTCA |
| | | GGGCCAGGTCACCATCTCTGCAGACAAGTCCATTTCTACAGCCTATCTG |
| | | CAGTGGAGCTCCCTGAAAGCCAGCGATACAGCTATGTACTATTGTGCAA |
| | | GAGGATACGGCATTTTCGATTATTGGGGCCAGGGCACCCTGGTCACCGT |
| | | CTCATCTGCTAGCACTAAGGGGCCTTCCGTGTTTCCACTGGCTCCCTCTA |
| | | GTAAATCCACCTCTGGAGGCACAGCTGCACTGGGATGTCTGGTGAAGG |
| | | ATTACTTCCCTGAACCAGTCACAGTGAGTTGGAACTCAGGGGCTCTGAC |
| | | AAGTGGAGTCCATACTTTTCCCGCAGTGCTGCAGTCAAGCGGACTGTAC |
| | | TCCCTGTCCTCTGTGGTCACCGTGCCTAGTTCAAGCCTGGGCACCCAGA |
| | | CATATATCTGCAACGTGAATCACAAGCCATCAAATACAAAAGTCGACA |
| | | AGAAAGTGGAGCCCAAGAGCTGTGATAAAACTCATACCTGCCCACCTT |
| | | GTCCGGCGCCAGAACTGCTGGGAGGACCAAGCGTGTTCCTGTTTCCACC |
| | | CAAGCCTAAAGACACCCTGATGATTTCCCGGACTCCTGAGGTCACCTGC |
| | | GTGGTCGTGGACGTGTCTCACGAGGACCCCGAAGTCAAGTTCAACTGGT |
| | | ACGTGGATGGCGTCGAAGTGCATAATGCCAAGACCAAACCCCGGGAGG |
| | | AACAGTACAACTCTACCTATAGAGTCGTGAGTGTCCTGACAGTGCTGCA |
| | | CCAGGACTGGCTGAATGGGAAGGAGTATAAGTGTAAAGTGAGCAACAA |
| | | AGCCCTGCCCGCCCCAATCGAAAAAACAATCTCTAAAGCAAAAGGACA |
| | | GCCTCGCGAACCACAGGTCTACGTCTACCCCCCATCAAGAGATGAACTG |
| | | ACAAAAAATCAGGTCTCTCTGACATGCCTGGTCAAAGGATTCTACCCTT |
| | | CCGACATCGCCGTGGAGTGGGAAAGTAACGGCCAGCCCGAGAACAATT |
| | | ACAAGACCACACCCCCTGTCCTGGACTCTGATGGGAGTTTCGCTCTGGT |
| | | GTCAAAGCTGACCGTCGATAAAAGCCGGTGGCAGCAGGGCAATGTGTT |
| | | TAGCTGCTCCGTCATGCACGAAGCCCTGCACAATCACTACACACAGAAG |
| | | TCCCTGAGCCTGAGCCCTGGC |
| 214 | 8022 | SYELTQPPSVSVSPGQTASITCSGDNIGDQYAHWYQQKPGQSPVLVIYQDK |
| | | NRPSGIPERFSGSNSGNTATLTISGTQAMDEADYYCATYTGFGSLAVFGGG |
| | | TKLTVLGQPKAAPSVTLFPPSSEELQANKATLVCLISDFYPGAVTVAWKAD |
| | | SSPVKAGVETTTPSKQSNNKYAASSYLSLTPEQWKSHRSYSCQVTHEGSTV |
| | | EKTVAPTECS |
| 215 | 8022 | AGCTATGAACTGACACAGCCACCTAGCGTGTCCGTCTCTCCAGGACAGA |
| | | CTGCATCCATCACCTGCTCTGGCGACAACATTGGGGATCAGTACGCCCA |
| | | CTGGTATCAGCAGAAGCCAGGGCAGAGTCCCGTGCTGGTCATCTACCAG |
| | | GACAAAAATCGGCCTTCCGGCATCCCCGAGAGATTCAGTGGATCAAAC |
| | | AGCGGCAATACCGCTACACTGACTATCAGCGGCACCCAGGCCATGGAC |
| | | GAAGCTGATTACTATTGTGCCACCTATACAGGGTTTGGAAGTCTGGCCG |
| | | TCTTCGGCGGCGGCACCAAACTGACCGTCCTGGGGCAGCCAAAAGCGG |
| | | CGCCCAGTGTCACACTGTTTCCCCCTAGCTCCGAGGAACTGCAGGCTAA |
| | | CAAAGCAACACTGGTGTGTCTGATCAGCGACTTCTACCCTGGAGCTGTG |
| | | ACTGTCGCCTGGAAGGCTGATTCTAGTCCAGTGAAAGCAGGCGTCGAG |
| | | ACCACAACTCCCTCTAAGCAGAGTAACAACAAGTACGCAGCCTCAAGC |
| | | TATCTGTCACTGACCCCAGAACAGTGGAAGAGCCACCGGAGCTATTCCT |
| | | GCCAGGTCACTCACGAAGGCTCCACTGTCGAGAAAACCGTCGCTCCCAC |
| | | CGAATGTTCA |
| 216 | 14395 | QVQLQQSGPELVKPGASVKISCKASGYVFSSYWMNWVKQRPGKGLEWIG |
| | | RIYPGNGDTNYNGKFKDKATLTADKFSSTAYMQLSNLTSEDSAVYFCASY |
| | | YELDYWGQGTSVTVSSASTKGPSVFPLAPSSKSTSGGTAALGCLVKDYFPE |
| | | PVTVSWNSGALTSGVHTFPAVLQSSGLYSLSSVVTVPSSSLGTQTYICNVNH |
| | | KPSNTKVDKKVEPKSCDKTHTCPPCPAPEAAGGPSVFLFPPKPKDTLMISRT |
| | | PEVTCVVVSVSHEDPEVKFNWYVDGVEVHNAKTKPREEQYNSTYRVVSV |
| | | LTVLHQDWLNGKEYKCKVSNKALPAPIEKTISKAKGQPREPQVYTLPPSRD |
| | | ELTKNQVSLTCLVKGFYPSDIAVEWESNGQPENNYKTIPPVLDSDGSFFLY |
| | | SKLTVDKSRWQQGNVFSCSVMHEALHNHYTQKSLSLSPG |
| 217 | 14395 | CAGGTGCAGCTGCAGCAGTCCGGACCAGAGCTGGTGAAGCCTGGGGCC |
| | | AGCGTGAAGATCAGCTGCAAGGCCTCCGGCTACGTGTTTAGCTCCTATT |
| | | GGATGAACTGGGTGAAGCAGCGGCCAGGCAAGGGACTGGAGTGGATCG |
| | | GCAGAATCTACCCCGGCAATGGCGACACAAACTATAATGGCAAGTTCA |
| | | AGGACAAGGCCACCCTGACAGCCGATAAGTTTTCTAGCACCGCCTACAT |
| | | GCAGCTGTCTAACCTGACAAGCGAGGACTCCGCCGTGTACTTCTGTGCC |
| | | TCTTACTATGAGCTGGATTATTGGGGCCAGGGCACCAGCGTGACAGTGT |
| | | CCTCTGCTAGCACAAAGGGCCCCTCCGTGTTTCCTCTGGCCCCATCCTCT |
| | | AAGTCCACCTCTGGAGGAACAGCCGCCCTGGGCTGTCTGGTGAAGGATT |
| | | ACTTCCCTGAGCCAGTGACCGTGTCCTGGAACTCTGGGGCCCTGACCAG |
| | | CGGAGTGCACACATTTCCCGCCGTGCRTCAGAGCTCCGGACTGTACTCC |
| | | CTGTCTAGCGTGGTGACCGTGCCTTCCTCTAGCCTGGGCACCCAGACAT |
| | | ATATCTGCAACGTGAATCACAAGCCTTCCAATACAAAGGTCGACAAGA |
| | | AGGTGGAGCCAAAGTCTTGTGATAAGACCCACACATGCCCACCTTGTCC |
| | | GGCGCCAGAGGCCGCCGGAGGACCAAGCGTGTTCCTGTTTCCACCCAA |
| | | GCCCAAGGACACCCTGATGATCTCCCGGACCCCAGAGGTGACATGCGT |
| | | GGTGGTGAGCGTGTCCCACGAGGACCCCGAGGTGAAGTTTAACTGGTA |
| | | CGTGGATGGCGTGGAGGTGCACAATGCCAAGACAAAGCCCCGGGAGGA |
| | | GCAGTACAATTCTACCTATAGAGTGGTGAGCGTGCTGACAGTGCTGCAC |
| | | CAGGATTGGCTGAACGGCAAGGAGTATAAGTGTAAGGTGAGCAATAAG |
| | | GCCCTGCCAGCCCCCATCGAGAAGACCATCTCCAAGGCCAAGGGCCAG |
| | | CCTCGCGAACCACAGGTGTACACTCTGCCTCCATCTCGGGACGAGCTGA |
| | | CTAAGAACCAGGTCAGTCTGACCTGTCTGGTGAAAGGATTCTATCCCAG |
| | | CGATATCGCTGTGGAGTGGGAATCCAATGGCCAGCCTGAGAACAATTA |
| | | CAAGACCACACCCCCTGTGCTGGACTCTGATGGCAGTTTCTTTCTGTATA |
| | | GTAAGCTGACCGTCGATAAATCACGATGGCAGCAGGGGAACGTGTTCA |
| | | GCTGTTCAGTGATGCACGAAGCCCTGCACAACCATTACACCCAGAAGA |
| | | GCCTGAGCCTGTCTCCCGGC |
| 218 | 1380 | EPKSSDKTHTCPPCPAPEAAGGPSVFLFPPKPKDTLMISRTPEVTCVVVSVS |
| | | HEDPEVKFNWYVDGVEVHNAKTKPREEQYNSTYRVVSVLTVLHQDWLN |
| | | GKEYKCKVSNKALPAPIEKTISKAKGQPREPQVYVYPPSRDELTKNQVSLT |
| | | CLVKGFYPSDIAVEWESNGQPENNYKTTPPVLDSDGSFALVSKLTVDKSR |
| | | WQQGNVFSCSVMHEALHNHYTQKSLSLSPGK |
| 219 | 1380 | GAACCTAAGAGCAGCGACAAGACTCACACCTGCCCACCTTGTCCAGCA |
| | | CCAGAAGCCGCCGGAGGACCAAGCGTGTTCCTGTTTCCACCCAAGCCCA |
| | | AAGATACCCTGATGATCAGCCGAACACCCGAAGTGACTTGCGTGGTCGT |
| | | GAGCGTGTCCCACGAGGACCCCGAAGTCAAGTTCAACTGGTACGTGGA |
| | | CGGCGTCGAAGTGCATAATGCTAAGACAAAACCACGGGAGGAACAGTA |
| | | CAACTCTACTTATAGAGTCGTGAGTGTCCTGACCGTGCTGCATCAGGAT |
| | | TGGCTGAACGGCAAAGAGTATAAGTGCAAAGTGTCTAATAAGGCCCTG |
| | | CCTGCTCCAATCGAGAAAACCATTAGTAAGGCTAAAGGGCAGCCCAGG |
| | | GAACCTCAGGTCTACGTGTATCCTCCAAGTCGCGACGAGCTGACCAAGA |
| | | ACCAGGTCTCACTGACATGTCTGGTGAAAGGATTTTACCCTTCCGATAT |
| | | TGCAGTGGAGTGGGAATCTAATGGCCAGCCAGAGAACAATTATAAGAC |
| | | CACACCCCCTGTGCTGGACAGCGATGGGTCCTTCGCACTGGTCTCAAAG |
| | | CTGACAGTGGACAAAAGCAGATGGCAGCAGGGAAACGTCTTTAGCTGT |
| | | TCCGTGATGCACGAAGCCCTGCACAATCATTACACTCAGAAGTCTCTGA |
| | | GTCTGTCACCTGGCAAA |
| 220 | 8056 | EPKSSDKTHTCPPCPAPELLGGPSVFLFPPKPKDTLMISRTPEVTCVVVDVS |
| | | HEDPEVKFNWYVDGVEVHNAKTKPREEQYNSTYRVVSVLTVLHQDWLN |
| | | GKEYKCKVSNKALPAPIEKTISKAKGQPREPQVYVYPPSRDELTKNQVSLT |
| | | CLVKGFYPSDIAVEWESNGQPENNYKTTPPVLDSDGSFALVSKLTVDKSR |
| | | WQQGNVFSCSVMHEALHNHYTQKSLSLSPG |
| 221 | 8056 | GAACCTAAATCATCCGATAAAACTCACACCTGTCCACCCTGTCCGGCGC |
| | | CAGAACTGCTGGGGGGGCCCTCCGTCTTCCTGTTTCCCCCTAAGCCAAA |
| | | AGACACCCTGATGATCTCTAGGACTCCCGAAGTCACCTGCGTGGTCGTG |
| | | GACGTGAGTCACGAGGACCCCGAAGTCAAGTTCAACTGGTACGTGGAT |
| | | GGCGTCGAGGTGCATAATGCCAAGACCAAACCCCGGGAGGAACAGTAC |
| | | AACAGCACCTATAGAGTCGTGTCCGTCCTGACAGTGCTGCACCAGGACT |
| | | GGCTGAACGGAAAGGAGTATAAGTGCAAAGTGTCAAATAAGGCCCTGC |
| | | CCGCTCCTATCGAGAAAACCATTAGCAAGGCTAAAGGCCAGCCTCGCG |
| | | AACCCCAGGTCTACGTGTATCCCCCTAGCCGCGACGAGCTGACAAAGA |
| | | ACCAGGTCTCCCTGACTTGTCTGGTGAAAGGGTTTTACCCTAGTGATAT |
| | | CGCAGTGGAGTGGGAATCAAATGGACAGCCAGAAAACAATTATAAGAC |
| | | CACACCACCCGTGCTGGACAGCGATGGCTCCTTCGCACTGGTCTCCAAG |
| | | CTGACTGTGGATAAATCTCGATGGCAGCAGGGGAACGTCTTTAGCTGCT |
| | | CCGTGATGCACGAGGCCCTGCACAATCATTACACACAGAAGTCTCTGAG |
| | | CTTAAGCCCTGGA |
| 222 | 10619 | QVQLVQSGAEVKKPGASVRVSCRASGYIFTESGITWVRQAPGQGLEWMG |
| | | WISGYSGDTKYAQKLQGRVTMTKDTSTTTAYMELRSLRYDDTAVYYCAR |
| | | DVQYSGSYLGAYYFDYWSPGTLVTVSSASTKGPSVFPLAPSSKSTSGGTAA |
| | | LGCLVKDYFPEPVTVSWNSGALTSGVHTFPAVLQSSGLYSLSSVVTVPSSSL |
| | | GTQTYICNVNHKPSNTKVDKKVEPKSCDKTHTCPPCPAPEAAGGPSVFLFP |
| | | PKPKDTLMISRTPEVTCVVVSVSHEDPEVKFNWYVDGVEVHNAKTKPREE |
| | | QYNSTYRVVSVLTVLHQDWLNGKEYKCKVSNKALPAPIEKTISKAKGQPR |
| | | EPQVYVYPPSRDELTKNQVSLTCLVKGFYPSDIAVEWESNGQPENNYKTTP |
| | | PVLDSDGSFALVSKLTVDKSRWQQGNVFSCSVMHEALHNHYTQKSLSLSP |
| | | G |
| 223 | 10619 | CAGGTGCAGCTGGTCCAGTCCGGGGCTGAAGTGAAAAAACCTGGGGCA |
| | | TCCGTGCGGGTGTCATGTCGGGCAAGCGGGTATATCTTTACTGAGTCTG |
| | | GAATCACCTGGGTGAGGCAGGCTCCCGGACAGGGACTGGAATGGATGG |
| | | GATGGATTTCTGGATACAGTGGCGACACAAAGTATGCACAGAAACTGC |
| | | AGGGCCGCGTCACCATGACAAAGGATACTTCAACCACAACTGCCTACAT |
| | | GGAGCTGCGGAGCCTGAGATATGACGATACAGCCGTGTACTATTGCGCC |
| | | CGGGACGTGCAGTACAGCGGGTCCTACCTGGGGGCATACTACTTCGATT |
| | | ACTGGTCACCTGGAACTCTGGTCACCGTCTCTTCAGCTAGCACTAAGGG |
| | | GCCTTCCGTGTTTCCACTGGCTCCCTCTAGTAAATCCACCTCTGGAGGCA |
| | | CAGCTGCACTGGGATGTCTGGTGAAGGATTACTTCCCTGAACCAGTCAC |
| | | AGTGAGTTGGAACTCAGGGGCTCTGACAAGTGGAGTCCATACTTTTCCC |
| | | GCAGTGCTGCAGTCAAGCGGACTGTACTCCCTGTCCTCTGTGGTCACCG |
| | | TGCCTAGTTCAAGCCTGGGCACCCAGACATATATCTGCAACGTGAATCA |
| | | CAAGCCATCAAATACAAAAGTCGACAAGAAAGTGGAGCCCAAGAGCTG |
| | | TGATAAAACTCATACCTGCCCACCTTGTCCGGCGCCAGAGGCTGCAGGA |
| | | GGACCAAGCGTGTCCCTGTTTCCACCCAAGCCTAAAGACACACTGATGA |
| | | TTTCCCGAACCCCCGAAGTCACATGCGTGGTCGTGTCTGTGAGTCACGA |
| | | GGACCCTGAAGTCAAGTTCAACTGGTACGTGGATGGCGTCGAGGTGCAT |
| | | AATGCCAAGACTAAACCTAGGGAGGAACAGTACAACTCAACCTATCGC |
| | | GTCGTGAGCGTCCTGACAGTGCTGCACCAGGATTGGCTGAACGGCAAA |
| | | GAATATAAGTGCAAAGTGAGCAATAAGGCCCTGCCCGCTCCTATCGAG |
| | | AAAACCATTTCCAAGGCTAAAGGGCAGCCTCGCGAACCACAGGTCTAC |
| | | GTGTATCCTCCAAGCCGGGACGAGCTGACAAAGAACCAGGTCTCCCTG |
| | | ACTTGTCTGGTGAAAGGGTTTTACCCTAGTGATATCGCTGTGGAGTGGG |
| | | AATCAAATGGACAGCCAGAGAACAATTATAAGACTACCCCCCCTGTGCT |
| | | GGACAGTGATGGGTCATTCGCACTGGTCTCCAAGCTGACAGTGGACAA |
| | | ATCTCGGTGGCAGCAGGGAAATGTCTTTTCATGTAGCGTGATGCATGAA |
| | | GCACTGCACAACCATTACACCCAGAAGTCACTGTCACTGTCACCAGGA |
| 224 | 10620 | QVQLVQSGAEVKKPGASVRVSCRASGYIFTESGITWVRQAPGQGLEWMG |
| | | WISGYSGDTKYAQKLQGRVTMTKDTSTTTAYMELRSLRYDDTAVYYCAR |
| | | DVQYSGSYLGAYYFDYWSPGTLVTVSSASTKGPSVFPLAPSSKSTSGGTAA |
| | | LGCLVKDYFPEPVTVSWNSGALTSGVHTFPAVLQSSGLYSLSSVVTVPSSSL |
| | | GTQTYICNVNHKPSNTKVDKKVEPKSCDKTHTCPPCPAPEAAGGPSVFLFP |
| | | PKPKDTLMISRTPEVTCVVVSVSHEDPEVKFNWYVDGVEVHNAKTKPREE |
| | | QYNSTYRVVSVLTVLHQDWLNGKEYKCKVSNKALPAPIEKTISKAKGQPR |
| | | EPQVYVLPPSRDELTKNQVSLLCLVKGFYPSDIAVEWESNGQPENNYLTWP |
| | | PVLDSDGSFFLYSKLTVDKSRWQQGNVFSCSVMHEALHNHYTQKSLSLSP |
| | | G |
| 225 | 10620 | CAGGTGCAGCTGGTCCAGTCCGGGGCTGAAGTGAAAAAACCTGGGGCA |
| | | TCCGTGCGGGTGTCATGTCGGGCAAGCGGGTATATCTTTACTGAGTCTG |
| | | GAATCACCTGGGTGAGGCAGGCTCCCGGACAGGGACTGGAATGGATGG |
| | | GATGGATTTCTGGATACAGTGGCGACACAAAGTATGCACAGAAACTGC |
| | | AGGGCCGCGTCACCATGACAAAGGATACTTCAACCACAACTGCCTACAT |
| | | GGAGCTGCGGAGCCTGAGATATGACGATACAGCCGTGTACTATTGCGCC |
| | | CGGGACGTGCAGTACAGCGGGTCCTACCTGGGGGCATACTACTTCGATT |
| | | ACTGGTCACCTGGAACTCTGGTCACCGTCTCTTCAGCTAGCACTAAGGG |
| | | GCCTTCCGTGTTTCCACTGGCTCCCTCTAGTAAATCCACCTCTGGAGGCA |
| | | CAGCTGCACTGGGATGTCTGGTGAAGGATTACTTCCCTGAACCAGTCAC |
| | | AGTGAGTTGGAACTCAGGGGCTCTGACAAGTGGAGTCCATACTTTTCCC |
| | | GCAGTGCTGCAGTCAAGCGGACTGTACTCCCTGTCCTCTGTGGTCACCG |
| | | TGCCTAGTTCAAGCCTGGGCACCCAGACATATATCTGCAACGTGAATCA |
| | | CAAGCCATCAAATACAAAAGTCGACAAGAAAGTGGAGCCCAAGAGCTG |
| | | TGATAAAACTCATACCTGCCCACCTTGTCCGGCGCCAGAGGCAGCAGGA |
| | | GGACCAAGCGTGTTCCTGTTTCCACCCAAGCCCAAAGACACCCTGATGA |
| | | TTAGCCGAACCCCTGAAGTCACATGCGTGGTCGTGTCCGTGTCTCACGA |
| | | GGACCCAGAAGTCAAGTTCAACTGGTACGTGGATGGCGTCGAGGTGCA |
| | | TAATGCCAAGACAAAACCCCGGGAGGAACAGTACAACAGCACCTATAG |
| | | AGTCGTGTCCGTCCTGACAGTGCTGCACCAGGATTGGCTGAACGGCAAG |
| | | GAATATAAGTGCAAAGTGTCCAATAAGGCCCTGCCCGCTCCTATCGAGA |
| | | AAACCATTTCTAAGGCAAAAGGCCAGCCTCGCGAACCACAGGTCTACG |
| | | TGCTGCCTCCATCCCGGGACGAGCTGACAAAGAACCAGGTCTCTCTGCT |
| | | GTGCCTGGTGAAAGGCTTCTATCCATCAGATATTGCTGTGGAGTGGGAA |
| | | AGCAATGGGCAGCCCGAGAACAATTACCTGACTTGGCCCCCTGTGCTGG |
| | | ACTCTGATGGGAGTTTCTTTCTGTATTCTAAGCTGACCGTGGATAAAAG |
| | | TAGGTGGCAGCAGGGAAATGTCTTTAGTTGTTCAGTGATGCATGAAGCC |
| | | CTGCATAACCACTACACCCAGAAAAGCCTGTCCCTGTCCCCCGGA |
| 226 | 11150 | DIQMTQSPSSLSASVGDRVTITCRASQDVNTAVAWYQQKPGKAPKLLIYSA |
| | | SFLYSGVPSRFSGSRSGTDFTLTISSLQPEDFATYYCQQHYTTPPTFGQGTKV |
| | | EIKRTVAAPSVFIFPPSDEQLKSGTASVVCLLNNFYPREAKVQWKVDNALQ |
| | | SGNSQESVTEQDSKDSTYSLSSTLTLSKADYEKHKVYACEVTHQGLSSPVT |
| | | KSFNRGEC |
| 227 | 11150 | GACATCCAGATGACACAGTCCCCAAGCTCCCTGTCCGCCTCTGTGGGCG |
| | | ACAGGGTGACCATCACATGCCGCGCCTCTCAGGATGTGAACACCGCCGT |
| | | GGCCTGGTACCAGCAGAAGCCAGGCAAGGCCCCCAAGCTGCTGATCTA |
| | | CAGCGCCTCCTTCCTGTATTCTGGCGTGCCCAGCCGGTTTTCTGGCAGCA |
| | | GATCCGGCACCGACTTCACCCTGACAATCTCTAGCCTGCAGCCTGAGGA |
| | | TTTTGCCACATACTATTGTCAGCAGCACTATACCACACCCCCTACCTTCG |
| | | GCCAGGGCACAAAGGTGGAGATCAAGCGGACAGTGGCGGCGCCCAGTG |
| | | TCTTCATTTTTCCCCCTAGCGACGAACAGCTGAAGTCTGGGACAGCCAG |
| | | TGTGGTCTGTCTGCTGAACAACTTCTACCCTAGAGAGGCTAAAGTGCAG |
| | | TGGAAGGTCGATAACGCACTGCAGTCCGGAAATTCTCAGGAGAGTGTG |
| | | ACTGAACAGGACTCAAAAGATAGCACCTATTCCCTGTCAAGCACACTGA |
| | | CTCTGAGCAAGGCCGACTACGAGAAGCATAAAGTGTATGCTTGTGAAG |
| | | TCACCCACCAGGGGCTGAGTTCACCAGTCACAAAATCATTCAACAGAG |
| | | GGGAGTGC |
| 228 | 20891 | DIQMTQSPSSLSASVGDRVTITCSASQGISNYLNWYQQKPGKAPKLLIYYTS |
| | | SLHSGVPSRFSGSGSGTDFTFTISSLQPEDIATYYCQQYSKFPWTFGQGTKV |
| | | EIKRTVAAPSVFIFPPSDEQLKSGTASVVCLLNNFYPREAKVQWKVDNALQ |
| | | SGNSQESVTEQDSKDSTYSLSSTLTLSKADYEKHKVYACEVTHQGLSSPVT |
| | | KSFNRGEC |
| 229 | 20891 | GACATCCAGATGACACAGAGCCCAAGCTCCCTGAGCGCCTCCGTGGGC |
| | | GATAGAGTGACCATCACATGCTCTGCCAGCCAGGGCATCTCCAACTACC |
| | | TGAATTGGTATCAGCAGAAGCCCGGCAAGGCCCCTAAGCTGCTGATCTA |
| | | CTATACCTCTAGCCTGCACTCCGGCGTGCCTTCTAGGTTTTCCGGCTCTG |
| | | GCAGCGGCACCGACTTCACCTTTACAATCTCCTCTCTGCAGCCTGAGGA |
| | | TATCGCCACATACTATTGTCAGCAGTACTCTAAGTTCCCATGGACCTTTG |
| | | GCCAGGGCACAAAGGTGGAGATCAAGCGCACAGTGGCGGCGCCCAGTG |
| | | TCTTCATTTTTCCCCCTAGCGACGAACAGCTGAAGTCTGGGACAGCCAG |
| | | TGTGGTCTGTCTGCTGAACAACTTCTACCCTAGAGAGGCTAAAGTGCAG |
| | | TGGAAGGTCGATAACGCACTGCAGTCCGGAAATTCTCAGGAGAGTGTG |
| | | ACTGAACAGGACTCAAAAGATAGCACCTATTCCCTGTCAAGCACACTGA |
| | | CTCTGAGCAAGGCCGACTACGAGAAGCATAAAGTGTATGCTTGTGAAG |
| | | TCACCCACCAGGGGCTGAGTTCACCAGTCACAAAATCATTCAACAGAG |
| | | GGGAGTGC |
| 230 | 20892 | DIQMTQSPSSLSASVGDRVTITCSASQGISNYLNWYQQKPGKAPKLLIYYTS |
| | | SLHSGVPSRFSGSGSGTDYTLTISSLQPEDIATYYCQQYSKFPWTFGQGTKL |
| | | EIKRTVAAPSVFIFPPSDEQLKSGTASVVCLLNNFYPREAKVQWKVDNALQ |
| | | SGNSQESVTEQDSKDSTYSLSSTLTLSKADYEKHKVYACEVTHQGLSSPVT |
| | | KSFNRGEC |
| 231 | 20892 | GACATCCAGATGACACAGAGCCCAAGCTCCCTGAGCGCCTCCGTGGGC |
| | | GATAGAGTGACCATCACATGCTCTGCCAGCCAGGGCATCTCCAACTACC |
| | | TGAATTGGTATCAGCAGAAGCCCGGCAAGGCCCCTAAGCTGCTGATCTA |
| | | CTATACCTCTAGCCTGCACTCCGGCGTGCCTTCTAGGTTTTCCGGCTCTG |
| | | GCAGCGGAACCGACTACACCCTGACAATCTCCTCTCTGCAGCCTGAGGA |
| | | TATCGCCACATACTATTGTCAGCAGTATTCTAAGTTCCCATGGACCTTTG |
| | | GCCAGGGCACAAAGCTGGAGATCAAGCGCACAGTGGCGGCGCCCAGTG |
| | | TCTTCATTTTTCCCCCTAGCGACGAACAGCTGAAGTCTGGGACAGCCAG |
| | | TGTGGTCTGTCTGCTGAACAACTTCTACCCTAGAGAGGCTAAAGTGCAG |
| | | TGGAAGGTCGATAACGCACTGCAGTCCGGAAATTCTCAGGAGAGTGTG |
| | | ACTGAACAGGACTCAAAAGATAGCACCTATTCCCTGTCAAGCACACTGA |
| | | CTCTGAGCAAGGCCGACTACGAGAAGCATAAAGTGTATGCTTGTGAAG |
| | | TCACCCACCAGGGGCTGAGTTCACCAGTCACAAAATCATTCAACAGAG |
| | | GGGAGTGC |
| 232 | 20893 | DIQMTQSPSSLSASVGDRVTITCSASQGISNYLNWYQQKPGKTVKLLIYYTS |
| | | SLHSGVPSRFSGSGSGTDYTLTISSLQPEDIATYYCQQYSKFPWTFGQGTKL |
| | | EIKRTVAAPSVFIFPPSDEQLKSGTASVVCLLNNFYPREAKVQWKVDNALQ |
| | | SGNSQESVTEQDSKDSTYSLSSTLTLSKADYEKHKVYACEVIHQGLSSPVT |
| | | KSFNRGEC |
| 233 | 20893 | GACATCCAGATGACACAGAGCCCTAGCTCCCTGAGCGCCTCCGTGGGCG |
| | | ATAGAGTGACCATCACATGCTCTGCCAGCCAGGGCATCTCCAACTACCT |
| | | GAATTGGTATCAGCAGAAGCCTGGCAAGACCGTGAAGCTGCTGATCTA |
| | | CTATACATCTAGCCTGCACTCCGGCGTGCCATCTAGGTTTTCCGGCTCTG |
| | | GCAGCGGAACCGACTACACCCTGACAATCTCCTCTCTGCAGCCAGAGGA |
| | | TATCGCCACATACTATTGTCAGCAGTATTCTAAGTTCCCCTGGACCTTTG |
| | | GCCAGGGCACAAAGCTGGAGATCAAGCGCACCGTGGCGGCGCCCAGTG |
| | | TCTTCATTTTTCCCCCTAGCGACGAACAGCTGAAGTCTGGGACAGCCAG |
| | | TGTGGTCTGTCTGCTGAACAACTTCTACCCTAGAGAGGCTAAAGTGCAG |
| | | TGGAAGGTCGATAACGCACTGCAGTCCGGAAATTCTCAGGAGAGTGTG |
| | | ACTGAACAGGACTCAAAAGATAGCACCTATTCCCTGTCAAGCACACTGA |
| | | CTCTGAGCAAGGCCGACTACGAGAAGCATAAAGTGTATGCTTGTGAAG |
| | | TCACCCACCAGGGGCTGAGTTCACCAGTCACAAAATCATTCAACAGAG |
| | | GGGAGTGC |
| 234 | 20894 | EVQLVESGGGLVQPGGSLRLSCAASGFTFSEFGMHWVRQAPGKGLEWVSY |
| | | ISSGGSTIYYADSVKGRFTISRDNAKNSLYLQMNSLRAEDTAVYYCARDW |
| | | VDYWGQGTLVTVSSASTKGPSVFPLAPSSKSTSGGTAALGCLVKDYFPEPV |
| | | TVSWNSGALTSGVHTFPAVLQSSGLYSLSSVVTVPSSSLGTQTYICNVNHKP |
| | | SNTKVDKKVEPKSCDKTHTCPPCPAPEAAGGPSVFLFPPKPKDTLMISRTPE |
| | | VTCVVVSVSHEDPEVKFNWYVDGVEVHNAKTKPREEQYNSTYRVVSVLT |
| | | VLHQDWLNGKEYKCKVSNXALPAPIEKTISKAKGQPREPQVYTLPPSRDEL |
| | | TKNQVSLTCLVKGFYPSDIAVEWESNGQPENNYKTTPPVLDSDGSFFLYSK |
| | | LTVDKSRWQQGNVFSCSVMHEALHNHYTQKSLSLSPG |
| 235 | 20894 | GAGGTGCAGCTGGTGGAGTCCGGAGGAGGACTGGTGCAGCCAGGAGGC |
| | | TCCCTGCGGCTGTCTTGCGCAGCCAGCGGCTTCACATTTTCTGAGTTCGG |
| | | CATGCACTGGGTGAGACAGGCCCCCGGCAAGGGACTGGAGTGGGTGTC |
| | | CTACATCAGCTCCGGCGGCTCTACCATCTACTATGCCGACAGCGTGAAG |
| | | GGCCGGTTTACAATCTCCAGAGATAACGCCAAGAACAGCCTGTACCTGC |
| | | AGATGAACAGCCTGAGGGCCGAGGACACCGCCGTGTACTATTGTGCCC |
| | | GCGACTGGGTGGATTATTGGGGCCAGGGCACCCTGGTGACAGTGTCTAG |
| | | CGCTAGCACAAAGGGCCCCTCCGTGTTTCCTCTGGCCCCATCCTCTAAG |
| | | TCCACCTCTGGAGGAACAGCCGCCCTGGGCTGTCTGGTGAAGGATTACT |
| | | TCCCTGAGCCAGTGACCGTGTCCTGGAACTCTGGGGCCCTGACCAGCGG |
| | | AGTGCACACATTTCCCGCCGTGCTGCAGAGCTCCGGACTGTACTCCCTG |
| | | TCTAGCGTGGTGACCGTGCCTTCCTCTAGCCTGGGCACCCAGACATATA |
| | | TCTGCAACGTGAATCACAAGCCTTCCAATACAAAGGTCGACAAGAAGG |
| | | TGGAGCCAAAGTCTTGTGATAAGACCCACACATGCCCACCTTGTCCGGC |
| | | GCCAGAGGCCGCCGGAGGACCAAGCGTGTTCCTGTTTCCACCCAAGCCC |
| | | AAGGACACCCTGATGATCTCCCGGACCCCAGAGGTGACATGCGTGGTG |
| | | GTGAGCGTGTCCCACGAGGACCCCGAGGTGAAGTTTAACTGGTACGTG |
| | | GATGGCGTGGAGGTGCACAATGCCAAGACAAAGCCCCGGGAGGAGCAG |
| | | TACAATTCTACCTATAGAGTGGTGAGCGTGCTGACAGTGCTGCACCAGG |
| | | ATTGGCTGAACGGCAAGGAGTATAAGTGTAAGGTGAGCAATAAGGCCC |
| | | TGCCAGCCCCCATCGAGAAGACCATCTCCAAGGCCAAGGGCCAGCCTC |
| | | GCGAACCACAGGTGTACACTCTGCCTCCATCTCGGGACGAGCTGACTAA |
| | | GAACCAGGTCAGTCTGACCTGTCTGGTGAAAGGATTCTATCCCAGCGAT |
| | | ATCGCTGTGGAGTGGGAATCCAATGGCCAGCCTGAGAACAATTACAAG |
| | | ACCACACCCCTGTGCTGGACTCTGATGGCAGTTTCTTTCTGTATAGTAA |
| | | GCTGACCGTCGATAAATCACGATGGCAGCAGGGGAACGTGTTCAGCTG |
| | | TTCAGTGATGCACGAAGCCCTGCACAACCATTACACCCAGAAGAGCCTG |
| | | AGCCTGTCTCCCGGC |
| 236 | 20895 | EVQLVESGGGLVQPGGSLRLSCAASGFTFSEFGMHWVRQAPGKGLEWVA |
| | | YISSGGSTIYYADSVKGRFTISRDNAKNSLYLQMNSLRAEDTAVYYCARD |
| | | WVDYWGQGTLLTVSSASTKGPSVFPLAPSSKSTSGGTAALGCLVKDYFPEP |
| | | VTVSWNSGALTSGVHTFPAVLQSSGLYSLSSVVTVPSSSLGTQTYICNVNH |
| | | KPSNTKVDKKVEPKSCDKTHTCPPCPAPEAAGGPSVFLFPPKPKDTLMISRT |
| | | PEVTCVVVSVSHEDPEVKFNWYVDGVEVHNAKTKPREEQYNSTYRVVSV |
| | | LTVLHQDWLNGKEYKCKVSNKALPAPIEKTISKAKGQPREPQVYTLPPSRD |
| | | ELTKNQVSLTCLVKGFYPSDIAVEWESNGQPENNYKTTPPVLDSDGSFFLY |
| | | SKLTVDKSRWQQGNVFSCSVMHEALHNHYTQKSLSLSPG |
| 237 | 20895 | GAGGTGCAGCTGGTGGAGAGCGGAGGAGGACTGGTGCAGCCAGGAGG |
| | | CTCCCTGCGGCTGTCTTGCGCAGCCAGCGGCTTCACATTTTCCGAGTTCG |
| | | GCATGCACTGGGTGAGACAGGCCCCCGGCAAGGGACTGGAGTGGGTGG |
| | | CCTACATCAGCTCCGGCGGCTCCACCATCTACTATGCCGACTCTGTGAA |
| | | GGGCCGGTTTACAATCAGCAGAGATAACGCCAAGAACAGCCTGTACCT |
| | | GCAGATGAACTCTCTGAGGGCCGAGGACACCGCCGTGTACTATTGTGCC |
| | | CGCGACTGGGTGGATTATTGGGGCCAGGGCACCCTGCTGACAGTGTCTA |
| | | GCGCTAGCACAAAGGGCCCCTCCGTGTTTCCTCTGGCCCCATCCTCTAA |
| | | GTCCACCTCTGGAGGAACAGCCGCCCTGGGCTGTCTGGTGAAGGATC |
| | | TTCCCTGAGCCAGTGACCGTGTCCTGGAACTCTGGGGCCCTGACCAGCG |
| | | GAGTGCACACATTTCCCGCCGTGCTGCAGAGCTCCGGACTGTACTCCCT |
| | | GTCTAGCGTGGTGACCGTGCCTTCCTCTAGCCTGGGCACCCAGACATAT |
| | | ATCTGCAACGTGAATCACAAGCCTTCCAATACAAAGGTCGACAAGAAG |
| | | GTGGAGCCAAAGTCTTGTGATAAGACCCACACATGCCCACCTTGTCCGG |
| | | CGCCAGAGGCCGCCGGAGGACCAAGCGTGTTCCTGTTTCCACCCAAGCC |
| | | CAAGGACACCCTGATGATCTCCCGGACCCCAGAGGTGACATGCGTGGT |
| | | GGTGAGCGTGTCCCACGAGGACCCCGAGGTGAAGTTTAACTGGTACGT |
| | | GGATGGCGTGGAGGTGCACAATGCCAAGACAAAGCCCCGGGAGGAGCA |
| | | GTACAATTCTACCTATAGAGTGGTGAGCGTGCTGACAGTGCTGCACCAG |
| | | GATTGGCTGAACGGCAAGGAGTATAAGTGTAAGGTGAGCAATAAGGCC |
| | | CTGCCAGCCCCCATCGAGAAGACCATCTCCAAGGCCAAGGGCCAGCCT |
| | | CGCGAACCACAGGTGTACACTCTGCCTCCATCTCGGGACGAGCTGACTA |
| | | AGAACCAGGTCAGTCTGACCTGTCTGGTGAAAGGATTCTATCCCAGCGA |
| | | TATCGCTGTGGAGTGGGAATCCAATGGCCAGCCTGAGAACAATTACAA |
| | | GACCACACCCCCTGTGCTGGACTCTGATGGCAGTTTCTTTCTGTATAGTA |
| | | AGCTGACCGTCGATAAATCACGATGGCAGCAGGGGAACGTGTTCAGCT |
| | | GTTCAGTGATGCACGAAGCCCTGCACAACCATTACACCCAGAAGAGCCT |
| | | GAGCCTGTCTCCCGGC |
| 238 | 20896 | EVQLVESGGGLVQPGGSLRLSCAASGFTFSEFGMHWVRQAPGKGLEWVA |
| | | YISSGGSTIYYADSVKGRFTISRDNAKNSLYLQMNSLRAEDTAMYYCARD |
| | | WVDYWGQGTLLTVSSASTKGPSVFPLAPSSKSTSGGTAALGCLVKDYFPEP |
| | | VTVSWNSGALTSGVHTFPAVLQSSGLYSLSSVVTVPSSSLGTQTYICNVNH |
| | | KPSNTKVDKKVEPKSCDKTHTCPPCPAPEAAGGPSVFLFPPKPKDTLMISRT |
| | | PEVTCVVVSVSHEDPEVKFNWYVDGVEVHNAKTKPREEQYNSTYRVVSV |
| | | LTVLHQDWLNGKEYKCKVSNKALPAPIEKTISKAKGQPREPQVYTLPPSRD |
| | | ELTKNQVSLTCLVKGFYPSDIAVEWESNGQPENNYKTTPPVLDSDGSFFLY |
| | | SKLTVDKSRWQQGNVFSCSVMHEALHNHYTQKSLSLSPG |
| 239 | 20896 | GAGGTGCAGCTGGTGGAGAGCGGAGGAGGACTGGTGCAGCCAGGAGG |
| | | CTCCCTGCGGCTGTCTTGCGCAGCCAGCGGCTTCACATTTTCCGAGTTCG |
| | | GCATGCACTGGGTGAGACAGGCCCCCGGCAAGGGACTGGAGTGGGTGG |
| | | CCTACATCAGCTCCGGCGGCTCCACCATCTACTATGCCGACTCTGTGAA |
| | | GGGCCGGTTTACAATCAGCAGAGATAACGCCAAGAACAGCCTGTACCT |
| | | GCAGATGAACTCTCTGAGGGCCGAGGACACCGCCATGTACTATTGTGCC |
| | | CGCGACTGGGTGGATTATTGGGGCCAGGGCACCCTGCTGACAGTGTCTA |
| | | GCGCTAGCACAAAGGGCCCCTCCGTGTTTCCTCTGGCCCCATCCTCTAA |
| | | GTCCACCTCTGGAGGAACAGCCGCCCTGGGCTGTCTGGTGAAGGATTAC |
| | | TTCCCTGAGCCAGTGACCGTGTCCTGGAACTCTGGGGCCCTGACCAGCG |
| | | GAGTGCACACATTTCCCGCCGTGCTGCAGAGCTCCGGACTGTACTCCCT |
| | | GTCTAGCGTGGTGACCGTGCCTTCCTCTAGCCTGGGCACCCAGACATAT |
| | | ATCTGCAACGTGAATCACAAGCCTTCCAATACAAAGGTCGACAAGAAG |
| | | GTGGAGCCAAAGTCTTGTGATAAGACCCACACATGCCCACCTTGTCCGG |
| | | CGCCAGAGGCCGCCGGAGGACCAAGCGTGTTCCTGTTTCCACCCAAGCC |
| | | CAAGGACACCCTGATGATCTCCCGGACCCCAGAGGTGACATGCGTGGT |
| | | GGTGAGCGTGTCCCACGAGGACCCCGAGGTGAAGTTTAACTGGTACGT |
| | | GGATGGCGTGGAGGTGCACAATGCCAAGACAAAGCCCCGGGAGGAGCA |
| | | GTACAATTCTACCTATAGAGTGGTGAGCGTGCTGACAGTGCTGCACCAG |
| | | GATTGGCTGAACGGCAAGGAGTATAAGTGTAAGGTGAGCAATAAGGCC |
| | | CTGCCAGCCCCCATCGAGAAGACCATCTCCAAGGCCAAGGGCCAGCCT |
| | | CGCGAACCACAGGTGTACACTCTGCCTCCATCTCGGGACGAGCTGACTA |
| | | AGAACCAGGTCAGTCTGACCTGTCTGGTGAAAGGATTCTATCCCAGCGA |
| | | TATCGCTGTGGAGTGGGAATCCAATGGCCAGCCTGAGAACAATTACAA |
| | | GACCACACCCCCTGTGCTGGACTCTGATGGCAGTTTCTTTCTGTATAGTA |
| | | AGCTGACCGTCGATAAATCACGATGGCAGCAGGGGAACGTGTTCAGCT |
| | | GTTCAGTGATGCACGAAGCCCTGCACAACCATTACACCCAGAAGAGCCT |
| | | GAGCCTGTCTCCCGGC |
| 240 | 20897 | EIVLTQSPATLSLSPGERATLSCKASENVGSYVSWYQQKPGQAPRLLIYGAS |
| | | NRYTGIPARFSGSGSGTDFTLTISSLEPEDFAVYYCGQSYSYPLTFGGGTKV |
| | | EIKRTVAAPSVFIFPPSDEQLKSGTASVVCLLNNFYPREAKVQWKVDNALQ |
| | | SGNSQESVTEQDSKDSTYSLSSTLTLSKADYEKHKVYACEVTHQGLSSPVT |
| | | KSFNRGEC |
| 241 | 20897 | GAGATCGTGCTGACCCAGTCCCCAGCCACACTGTCTCTGAGCCCAGGAG |
| | | AGAGGGCCACACTGTCTTGCAAGGCCAGCGAGAACGTGGGCAGCTACG |
| | | TGTCCTGGTATCAGCAGAAGCCAGGACAGGCCCCTCGGCTGCTGATCTA |
| | | CGGGGCCAGCAATCGGTATACCGGCATCCCCGCAAGATTCTCCGGCTCT |
| | | GGCAGCGGCACAGACTTTACCCTGACAATCAGCTCCCTGGAGCCTGAGG |
| | | ATTTCGCCGTGTACTATTGTGGCCAGTCCTACTCTTATCCACTGACCTTT |
| | | GGCGGCGGCACAAAGGTGGAGATCAAGAGGACCGTGGCGGCGCCCAGT |
| | | GTCTTCATTTTTCCCCCTAGCGACGAACAGCTGAAGTCTGGGACAGCCA |
| | | GTGTGGTCTGTCTGCTGAACAACTTCTACCCTAGAGAGGCTAAAGTGCA |
| | | GTGGAAGGTCGATAACGCACTGCAGTCCGGAAATTCTCAGGAGAGTGT |
| | | GACTGAACAGGACTCAAAAGATAGCACCTATTCCCTGTCAAGCACACTG |
| | | ACTCTGAGCAAGGCCGACTACGAGAAGCATAAAGTGTATGCTTGTGAA |
| | | GTCACCCACCAGGGGCTGAGTTCACCAGTCACAAAATCATTCAACAGA |
| | | GGGGAGTGC |
| 242 | 20898 | EIVLTQSPATLSLSPGERATLSCKASENVGSYVSWYQQKPGQAPRLLIYGAS |
| | | NRYTGVPARFSGSGSGTDFTLTISSLEPEDFAVYYCGQSYSYPLTFGGGTKV |
| | | EIKRTVAAPSVFIFPPSDEQLKSGTASVVCLLNNFYPREAKVQWKVDNALQ |
| | | SGNSQESVTEQDSKDSTYSLSSTLTLSKADYEKHKVYACEVTHQGLSSPVT |
| | | KSFNRGEC |
| 243 | 20898 | GAGATCGTGCTGACCCAGTCCCCAGCCACACTGTCTCTGAGCCCAGGAG |
| | | AGAGGGCCACACTGTCTTGCAAGGCCAGCGAGAACGTGGGCAGCTACG |
| | | TGTCCTGGTATCAGCAGAAGCCAGGACAGGCCCCTCGGCTGCTGATCTA |
| | | CGGGGCCAGCAATCGGTATACCGGAGTGCCCGCCAGATTCTCCGGCTCT |
| | | GGCAGCGGCACAGACTTTACCCTGACAATCAGCTCCCTGGAGCCTGAGG |
| | | ATTTCGCCGTGTACTATTGTGGCCAGTCCTACTCTTATCCACTGACCTTT |
| | | GGCGGCGGCACAAAGGTGGAGATCAAGAGGACCGTGGCGGCGCCCAGT |
| | | GTCTTCATTTTTCCCCCTAGCGACGAACAGCTGAAGTCTGGGACAGCCA |
| | | GTGTGGTCTGTCTGCTGAACAACTTCTACCCTAGAGAGGCTAAAGTGCA |
| | | GTGGAAGGTCGATAACGCACTGCAGTCCGGAAATTCTCAGGAGAGTGT |
| | | GACTGAACAGGACTCAAAAGATAGCACCTATTCCCTGTCAAGCACACTG |
| | | ACTCTGAGCAAGGCCGACTACGAGAAGCATAAAGTGTATGCTTGTGAA |
| | | GTCACCCACCAGGGGCTGAGTTCACCAGTCACAAAATCATTCAACAGA |
| | | GGGGAGTGC |
| 244 | 20899 | EIVMTQSPATLSLSPGERVTLSCKASENVGSYVSWYQQKPGQAPRLLIYGA |
| | | SNRYTGVPARFSGSGSGTDFTLTISSVEPEDFAVYYCGQSYSYPLTFGGGTK |
| | | LELKRTVAAPSVFIFPPSDEQLKSGTASVVCLLNNFYPREAKVQWKVDNAL |
| | | QSGNSQESVTEQDSKDSTYSLSSTLTLSKADYEKHKVYACEVTHQGLSSPV |
| | | TKSFNRGEC |
| 245 | 20899 | GAGATCGTGATGACCCAGTCCCCAGCCACACTGTCTCTGAGCCCAGGAG |
| | | AGAGGGTGACACTGTCTTGCAAGGCCAGCGAGAACGTGGGCAGCTACG |
| | | TGTCCTGGTATCAGCAGAAGCCAGGACAGGCCCCTCGGCTGCTGATCTA |
| | | CGGGGCCAGCAATCGGTATACCGGAGTGCCCGCCAGATTCTCCGGCTCT |
| | | GGCAGCGGCACAGACTTTACCCTGACAATCAGCTCCGTGGAGCCTGAG |
| | | GATTTCGCCGTGTACTATTGTGGCCAGTCCTACTCTTATCCACTGACCTT |
| | | TGGCGGCGGCACAAAGCTGGAGCTGAAGAGGACCGTGGCGGCGCCCAG |
| | | TGTCTTCATTTTTCCCCCTAGCGACGAACAGCTGAAGTCTGGGACAGCC |
| | | AGTGTGGTCTGTCTGCTGAACAACTTCTACCCTAGAGAGGCTAAAGTGC |
| | | AGTGGAAGGTCGATAACGCACTGCAGTCCGGAAATTCTCAGGAGAGTG |
| | | TGACTGAACAGGACTCAAAAGATAGCACCTATTCCCTGTCAAGCACACT |
| | | GACTCTGAGCAAGGCCGACTACGAGAAGCATAAAGTGTATGCTTGTGA |
| | | AGTCACCCACCAGGGGCTGAGTTCACCAGTCACAAAATCATTCAACAG |
| | | AGGGGAGTGC |
| 246 | 20900 | EIVMTQSPATLSLSPGERVTLTSCKASENVGSYVSWYQQKPGQAPRLLIYGA |
| | | SNRYTGVPARFSGSGSGTDFTLTISSVEPEDLAVYYCGQSYSYPLTFGGGTK |
| | | LELKRTVAAPSVFIFPPSDEQLKSGTASVVCLLNNFYPREAKVQWKVDNAL |
| | | QSGNSQESVTEQDSKDSTYSLSSTLTLSKADYEKHKVYACEVTHQGLSSPV |
| | | TKSFNRGEC |
| 247 | 20900 | GAGATCGTGATGACCCAGTCCCCAGCCACACTGTCTCTGAGCCCAGGAG |
| | | AGAGGGTGACACTGTCTTGCAAGGCCAGCGAGAACGTGGGCAGCTACG |
| | | TGTCCTGGTATCAGCAGAAGCCAGGACAGGCCCCTCGGCTGCTGATCTA |
| | | CGGGGCCAGCAATCGGTATACCGGAGTGCCCGCCAGATTCTCCGGCTCT |
| | | GGCAGCGGCACAGACTTTACCCTGACAATCAGCTCCGTGGAGCCTGAG |
| | | GATCTGGCCGTGTACTATTGTGGCCAGTCCTACTCTTATCCACTGACCTT |
| | | TGGCGGCGGCACAAAGCTGGAGCTGAAGAGGACCGTGGCGGCGCCCAG |
| | | TGTCTTCATTTTTCCCCCTAGCGACGAACAGCTGAAGTCTGGGACAGCC |
| | | AGTGTGGTCTGTCTGCTGAACAACTTCTACCCTAGAGAGGCTAAAGTGC |
| | | AGTGGAAGGTCGATAACGCACTGCAGTCCGGAAATTCTCAGGAGAGTG |
| | | TGACTGAACAGGACTCAAAAGATAGCACCTATTCCCTGTCAAGCACACT |
| | | GACTCTGAGCAAGGCCGACTACGAGAAGCATAAAGTGTATGCTTGTGA |
| | | AGTCACCCACCAGGGGCTGAGTTCACCAGTCACAAAATCATTCAACAG |
| | | AGGGGAGTGC |
| 248 | 20901 | QVQLQESGPGLVKPSETLSLTCTVSGFSLISYGVHWIRQPPGKGLEWIGVIW |
| | | SGGSTDYNPSLKSRVTISVDTSKNQFSLKLSSVTAADTAVYYCARNPLTAT |
| | | VMDYWGQGTLVTVSSASTKGPSVFPLAPSSKSTSGGTAALGCLVKDYFPEP |
| | | VTVSWNSGALTSGVHTFPAVLQSSGLYSLSSVVTVPSSSLGTQTYICNVNH |
| | | KPSNTKVDKKVEPKSCDKTHTCPPCPAPEAAGGPSVFLFPPKPKDTLMISRT |
| | | PEVTCVVVSVSHEDPEVKFNWYVDGVEVHNAKTKPREEQYNSTYRVVSV |
| | | LTVLHQDWLNGKEYKCKVSNKALPAPIEKTISKAKGQPREPQVYTLPPSRD |
| | | ELTKNQVSLTCLVKGFYPSDIAVEWESNGQPENNYKTTPPVLDSDGSFFLY |
| | | SKLTVDKSRWQQGNVFSCSVMHEALHNHYTQKSLSLSPG |
| 249 | 20901 | CAGGTGCAGCTGCAGGAGTCCGGACCAGGACTGGTGAAGCCATCTGAG |
| | | ACACTGAGCCTGACCTGCACAGTGTCCGGCTTTTCTCTGATCAGCTACG |
| | | GAGTGCACTGGATCAGGCAGCCACCTGGCAAGGGACTGGAGTGGATCG |
| | | GCGTGATCTGGTCCGGCGGCTCTACCGACTATAACCCCAGCCTGAAGTC |
| | | CCGCGTGACCATCTCCGTGGATACATCTAAGAATCAGTTCAGCCTGAAG |
| | | CTGAGCTCCGTGACCGCCGCCGACACAGCCGTGTACTATTGTGCCCGGA |
| | | ACCCTCTGACCGCCACAGTGATGGATTACTGGGGCCAGGGCACCCTGGT |
| | | GACAGTGTCTAGCGCTAGCACAAAGGGCCCCTCCGTGTTTCCTCTGGCC |
| | | CCATCCTCTAAGTCCACCTCTGGAGGAACAGCCGCCCTGGGCTGTCTGG |
| | | TGAAGGATTACTTCCCTGAGCCAGTGACCGTGTCCTGGAACTCTGGGGC |
| | | CCTGACCAGCGGAGTGCACACATTTCCCGCCGTGCTGCAGAGCTCCGGA |
| | | CTGTACTCCCTGTCTAGCGTGGTGACCGTGCCTTCCTCTAGCCTGGGCAC |
| | | CCAGACATATATCTGCAACGTGAATCACAAGCCTTCCAATACAAAGGTC |
| | | GACAAGAAGGTGGAGCCAAAGTCTTGTGATAAGACCCACACATGCCCA |
| | | CCTTGTCCGGCGCCAGAGGCCGCCGGAGGACCAAGCGTGTTCCTGTTTC |
| | | CACCCAAGCCCAAGGACACCCTGATGATCTCCCGGACCCCAGAGGTGA |
| | | CATGCGTGGTGGTGAGCGTGTCCCACGAGGACCCCGAGGTGAAGTTTA |
| | | ACTGGTACGTGGATGGCGTGGAGGTGCACAATGCCAAGACAAAGCCCC |
| | | GGGAGGAGCAGTACAATTCTACCTATAGAGTGGTGAGCGTGCTGACAG |
| | | TGCTGCACCAGGATTGGCTGAACGGCAAGGAGTATAAGTGTAAGGTGA |
| | | GCAATAAGGCCCTGCCAGCCCCCATCGAGAAGACCATCTCCAAGGCCA |
| | | AGGGCCAGCCTCGCGAACCACAGGTGTACACTCTGCCTCCATCTCGGGA |
| | | CGAGCTGACTAAGAACCAGGTCAGTCTGACCTGTCTGGTGAAAGGATTC |
| | | TATCCCAGCGATATCGCTGTGGAGTGGGAATCCAATGGCCAGCCTGAGA |
| | | ACAATTACAAGACCACACCCCCTGTGCTGGACTCTGATGGCAGTTTCTT |
| | | TCTGTATAGTAAGCTGACCGTCGATAAATCACGATGGCAGCAGGGGAA |
| | | CGTGTTCAGCTGTTCAGTGATGCACGAAGCCCTGCACAACCATTACACC |
| | | CAGAAGAGCCTGAGCCTGTCTCCCGGC |
| 250 | 20902 | QVQLQESGPGLVKPSETLSLTCTVSGFSLISYGVHWVRQPPGKGLEWLGVI |
| | | WSGGSTDYNPSLKSRVTISKDTSKNQFSLKLSSVTAADTAVYYCARNPLTA |
| | | TVMDYWGQGTLVTVSSASTKGPSVFPLAPSSKSTSGGTAALGCLVKDYFPE |
| | | PVTVSWNSGALTSGVHTFPAVLQSSGLYSLSSVVTVPSSSLGTQTYICNVNH |
| | | KPSNTKVDKKVEPKSCDKTHTCPPCPAPEAAGGPSVFLFPPKPKDTLMISRT |
| | | PEVTCVVVSVSHEDPEVKFNWYVDGVEVHNAKTKPREEQYNSTYRVVSV |
| | | LTVLHQDWLNGKEYKCKVSNKALPAPIEKTISKAKGQPREPQVYTLPPSRD |
| | | ELTKNQVSLTCLVKGFYPSDIAVEWESNGQPENNYKTTPPVLDSDGSFFLY |
| | | SKLTVDKSRWQQGNVFSCSVMHEALHNHYTQKSLSLSPG |
| 251 | 20902 | CAGGTGCAGCTGCAGGAGTCCGGACCAGGACTGGTGAAGCCATCTGAG |
| | | ACACTGAGCCTGACCTGCACAGTGTCCGGCTTTTCTCTGATCAGCTACG |
| | | GAGTGCACTGGGTGAGGCAGCCACCTGGCAAGGGACTGGAGTGGCTGG |
| | | GCGTGATCTGGTCCGGAGGCTCTACCGACTATAACCCCAGCCTGAAGTC |
| | | CCGCGTGACCATCTCCAAGGATACATCTAAGAATCAGTTCAGCCTGAAG |
| | | CTGAGCTCCGTGACCGCCGCCGACACAGCCGTGTACTATTGTGCCCGGA |
| | | ACCCTCTGACCGCCACAGTGATGGATTACTGGGGCCAGGGCACCCTGGT |
| | | GACAGTGTCTAGCGCTAGCACAAAGGGCCCCTCCGTGTTTCCTCTGGCC |
| | | CCATCCTCTAAGTCCACCTCTGGAGGAACAGCCGCCCTGGGCTGTCTGG |
| | | TGAAGGATTACTTCCCTGAGCCAGTGACCGTGTCCTGGAACTCTGGGGC |
| | | CCTGACCAGCGGAGTGCACACATTTCCCGCCGTGCTGCAGAGCTCCGGA |
| | | CTGTACTCCCTGTCTAGCGTGGTGACCGTGCCTTCCTCTAGCCTGGGCAC |
| | | CCAGACATATATCTGCAACGTGAATCACAAGCCTTCCAATACAAAGGTC |
| | | GACAAGAAGGTGGAGCCAAAGTCTTGTGATAAGACCCACACATGCCCA |
| | | CCTTGTCCGGCGCCAGAGGCCGCCGGAGGACCAAGCGTGTTCCTGTTTC |
| | | CACCCAAGCCCAAGGACACCCTGATGATCTCCCGGACCCCAGAGGTGA |
| | | CATGCGTGGTGGTGAGCGTGTCCCACGAGGACCCCGAGGTGAAGTTTA |
| | | ACTGGTACGTGGATGGCGTGGAGGTGCACAATGCCAAGACAAAGCCCC |
| | | GGGAGGAGCAGTACAATTCTACCTATAGAGTGGTGAGCGTGCTGACAG |
| | | TGCTGCACCAGGATTGGCTGAACGGCAAGGAGTATAAGTGTAAGGTGA |
| | | GCAATAAGGCCCTGCCAGCCCCCATCGAGAAGACCATCTCCAAGGCCA |
| | | AGGGCCAGCCTCGCGAACCACAGGTGTACACTCTGCCTCCATCTCGGGA |
| | | CGAGCTGACTAAGAACCAGGTCAGTCTGACCTGTCTGGTGAAAGGATTC |
| | | TATCCCAGCGATATCGCTGTGGAGTGGGAATCCAATGGCCAGCCTGAGA |
| | | ACAATTACAAGACCACACCCCCTGTGCTGGACTCTGATGGCAGTTTCTT |
| | | TCTGTATAGTAAGCTGACCGTCGATAAATCACGATGGCAGCAGGGGAA |
| | | CGTGTTCAGCTGTTCAGTGATGCACGAAGCCCTGCACAACCATTACACC |
| | | CAGAAGAGCCTGAGCCTGTCTCCCGGC |
| 252 | 20903 | QVQLQESGPGLVKPSETLSITCTVSGFSLISYGVHWVRQPPGKGLEWLGVI |
| | | WSGGSTDYNPSLKSRVTISKDTSKNQVSFKLSSLTAADTAIYYCARNPLTAT |
| | | VMDYWGQGTLVTVSSASTKGPSVFPLAPSSKSTSGGTAALGCLVKDYFPEP |
| | | VTVSWNSGALTSGVHTFPAVLQSSGLYSLSSVVTVPSSSLGTQTYICNVNH |
| | | KPSNTKVDKKVEPKSCDKTHTCPPCPAPEAAGGPSVFLFPPKPKDTLMISRT |
| | | PEVTCVVVSVSHEDPEVKFNWYVDGVEVHNAKTKPREEQYNSTYRVVSV |
| | | LTVLHQDWLNGKEYKCKVSNKALPAPIEKTISKAKGQPREPQVYTLPPSRD |
| | | ELTKNQVSLTCLVKGFYPSDIAVEWESNGQPENNYKTTPPVLDSDGSFFLY |
| | | SKLTVDKSRWQQGNVFSCSVMHEALHNHYTQKSLSLSPG |
| 253 | 20903 | CAGGTGCAGCTGCAGGAGTCCGGACCAGGACTGGTGAAGCCATCTGAG |
| | | ACACTGAGCATCACCTGCACAGTGTCCGGCTTTTCTCTGATCAGCTACG |
| | | GAGTGCACTGGGTGAGGCAGCCACCTGGCAAGGGACTGGAGTGGCTGG |
| | | GCGTGATCTGGTCCGGAGGCTCTACCGACTATAACCCCAGCCTGAAGTC |
| | | CCGCGTGACCATCTCCAAGGATACATCTAAGAATCAGGTGAGCTTCAAG |
| | | CTGAGCTCCCTGACCGCCGCCGACACAGCCATCTACTATTGTGCCCGGA |
| | | ACCCTCTGACCGCCACAGTGATGGATTACTGGGGCCAGGGCACCCTGGT |
| | | GACAGTGTCTAGCGCTAGCACAAAGGGCCCCTCCGTGTTTCCTCTGGCC |
| | | CCATCCTCTAAGTCCACCTCTGGAGGAACAGCCGCCCTGGGCTGTCTGG |
| | | TGAAGGATTACTTCCCTGAGCCAGTGACCGTGTCCTGGAACTCTGGGGC |
| | | CCTGACCAGCGGAGTGCACACATTTCCCGCCGTGCTGCAGAGCTCCGGA |
| | | CTGTACTCCCTGTCTAGCGTGGTGACCGTGCCTTCCTCTAGCCTGGGCAC |
| | | CCAGACATATATCTGCAACGTGAATCACAAGCCTTCCAATACAAAGGTC |
| | | GACAAGAAGGTGGAGCCAAAGTCTTGTGATAAGACCCACACATGCCCA |
| | | CCTTGTCCGGCGCCAGAGGCCGCCGGAGGACCAAGCGTGTTCCTGTTTC |
| | | CACCCAAGCCCAAGGACACCCTGATGATCTCCCGGACCCCAGAGGTGA |
| | | CATGCGTGGTGGTGAGCGTGTCCCACGAGGACCCCGAGGTGAAGTTTA |
| | | ACTGGTACGTGGATGGCGTGGAGGTGCACAATGCCAAGACAAAGCCCC |
| | | GGGAGGAGCAGTACAATTCTACCTATAGAGTGGTGAGCGTGCTGACAG |
| | | TGCTGCACCAGGATTGGCTGAACGGCAAGGAGTATAAGTGTAAGGTGA |
| | | GCAATAAGGCCCTGCCAGCCCCCATCGAGAAGACCATCTCCAAGGCCA |
| | | AGGGCCAGCCTCGCGAACCACAGGTGTACACTCTGCCTCCATCTCGGGA |
| | | CGAGCTGACTAAGAACCAGGTCAGTCTGACCTGTCTGGTGAAAGGATTC |
| | | TATCCCAGCGATATCGCTGTGGAGTGGGAATCCAATGGCCAGCCTGAGA |
| | | ACAATTACAAGACCACACCCCCTGTGCTGGACTCTGATGGCAGTTTCTT |
| | | TCTGTATAGTAAGCTGACCGTCGATAAATCACGATGGCAGCAGGGGAA |
| | | CGTGTTCAGCTGTTCAGTGATGCACGAAGCCCTGCACAACCATTACACC |
| | | CAGAAGAGCCTGAGCCTGTCTCCCGGC |
| 254 | 20904 | QVQLQESGPGLVKPSETLSITCTVSGFSLISYGVHWVRQPPGKGLEWLGVI |
| | | WSGGSTDYNPSLKSRVTISKDNSKNQVSFKLSSLTAADTAIYYCARNPLTA |
| | | TVMDYWGQGTLVTVSSASTKGPSVFPLAPSSKSTSGGTAALGCLVKDYFPE |
| | | PVTVSWNSGALTSGVHTFPAVLQSSGLYSLSSVVTVPSSSLGTQTYICNVNH |
| | | KPSNTKVDKKVEPKSCDKTHTCPPCPAPEAAGGPSVFLFPPKPKDTLMISRT |
| | | PEVTCVVVSVSHEDPEVKFNWYVDGVEVHNAKTKPREEQYNSTYRVVSV |
| | | LTVLHQDWLNGKEYKCKVSNKALPAPIEKTISKAKGQPREPQVYTLPPSRD |
| | | ELTKNQVSLTCLVKGFYPSDIAVEWESNGQPENNYKTTPPVLDSDGSFFLY |
| | | SKLTVDKSRWQQGNVFSCSVMHEALHNHYTQKSLSLSPG |
| 255 | 20904 | CAGGTGCAGCTGCAGGAGTCCGGACCAGGACTGGTGAAGCCATCTGAG |
| | | ACACTGAGCATCACCTGCACAGTGTCCGGCTTTTCTCTGATCAGCTACG |
| | | GAGTGCACTGGGTGAGGCAGCCACCTGGCAAGGGACTGGAGTGGCTGG |
| | | GCGTGATCTGGTCCGGAGGCTCTACCGACTATAACCCCAGCCTGAAGTC |
| | | CCGCGTGACAATCTCCAAGGATAACTCTAAGAATCAGGTGAGCTTCAAG |
| | | CTGAGCTCCCTGACCGCCGCCGACACAGCCATCTACTATTGTGCCCGGA |
| | | ATCCTCTGACCGCCACAGTGATGGATTACTGGGGCCAGGGCACCCTGGT |
| | | GACAGTGTCTAGCGCTAGCACAAAGGGCCCCTCCGTGTTTCCTCTGGCC |
| | | CCATCCTCTAAGTCCACCTCTGGAGGAACAGCCGCCCTGGGCTGTCTGG |
| | | TGAAGGATTACTTCCCTGAGCCAGTGACCGTGTCCTGGAACTCTGGGGC |
| | | CCTGACCAGCGGAGTGCACACATTTCCCGCCGTGCTGCAGAGCTCCGGA |
| | | CTGTACTCCCTGTCTAGCGTGGTGACCGTGCCTTCCTCTAGCCTGGGCAC |
| | | CCAGACATATATCTGCAACGTGAATCACAAGCCTTCCAATACAAAGGTC |
| | | GACAAGAAGGTGGAGCCAAAGTCTTGTGATAAGACCCACACATGCCCA |
| | | CCTTGTCCGGCGCCAGAGGCCGCCGGAGGACCAAGCGTGTTCCTGTTTC |
| | | CACCCAAGCCCAAGGACACCCTGATGATCTCCCGGACCCCAGAGGTGA |
| | | CATGCGTGGTGGTGAGCGTGTCCCACGAGGACCCCGAGGTGAAGTTTA |
| | | ACTGGTACGTGGATGGCGTGGAGGTGCACAATGCCAAGACAAAGCCCC |
| | | GGGAGGAGCAGTACAATTCTACCTATAGAGTGGTGAGCGTGCTGACAG |
| | | TGCTGCACCAGGATTGGCTGAACGGCAAGGAGTATAAGTGTAAGGTGA |
| | | GCAATAAGGCCCTGCCAGCCCCCATCGAGAAGACCATCTCCAAGGCCA |
| | | AGGGCCAGCCTCGCGAACCACAGGTGTACACTCTGCCTCCATCTCGGGA |
| | | CGAGCTGACTAAGAACCAGGTCAGTCTGACCTGTCTGGTGAAAGGATTC |
| | | TATCCCAGCGATATCGCTGTGGAGTGGGAATCCAATGGCCAGCCTGAGA |
| | | ACAATTACAAGACCACACCCCCTGTGCTGGACTCTGATGGCAGTTTCTT |
| | | TCTGTATAGTAAGCTGACCGTCGATAAATCACGATGGCAGCAGGGGAA |
| | | CGTGTTCAGCTGTTCAGTGATGCACGAAGCCCTGCACAACCATTACACC |
| | | CAGAAGAGCCTGAGCCTGTCTCCCGGC |
| 256 | 20905 | DIQMTQSPSSLSASVGDRVTITCRASQNVGTNVAWFQQKPGKAPKSLIYSA |
| | | SYRDSGVPSRFSGSGSGTDFTLTISSLQPEDFATYYCQQYNSYPLTFGGGTK |
| | | VEIKRTVAAPSVFIFPPSDEQLKSGTASVVCLLNNFYPREAKVQWKVDNAL |
| | | QSGNSQESVTEQDSKDSTYSLSSTLTLSKADYEKHKVYACEVTHQGLSSPV |
| | | TKSFNRGEC |
| 257 | 20905 | GACATCCAGATGACACAGTCCCCAAGCTCCCTGTCCGCCTCTGTGGGCG |
| | | ATAGGGTGACCATCACATGCAGAGCCTCTCAGAACGTGGGCACCAATG |
| | | TGGCCTGGTTTCAGCAGAAGCCCGGCAAGGCCCCTAAGTCCCTGATCTA |
| | | CAGCGCCTCCTATAGGGACTCTGGAGTGCCTAGCCGCTTCTCTGGCAGC |
| | | GGCTCCGGAACCGACTTTACCCTGACAATCTCTAGCCTGCAGCCTGAGG |
| | | ATTTCGCCACATACTATTGTCAGCAGTACAACAGCTATCCACTGACCTTT |
| | | GGCGGCGGCACAAAGGTGGAGATCAAGCGGACAGTGGCGGCGCCCAGT |
| | | GTCTTCATTTTTCCCCCTAGCGACGAACAGCTGAAGTCTGGGACAGCCA |
| | | GTGTGGTCTGTCTGCTGAACAACTTCTACCCTAGAGAGGCTAAAGTGCA |
| | | GTGGAAGGTCGATAACGCACTGCAGTCCGGAAATTCTCAGGAGAGTGT |
| | | GACTGAACAGGACTCAAAAGATAGCACCTATTCCCTGTCAAGCACACTG |
| | | ACTCTGAGCAAGGCCGACTACGAGAAGCATAAAGTGTATGCTTGTGAA |
| | | GTCACCCACCAGGGGCTGAGTTCACCAGTCACAAAATCATTCAACAGA |
| | | GGGGAGTGC |
| 258 | 20906 | DIQMTQSPSSLSASVGDRVTITCRASQNVGTNVAWYQQKPGKAPKALIYSA |
| | | SYRDSGVPSRFSGSGSGTDFTLTISSLQPEDFATYYCQQYNSYPLTFGGGTK |
| | | VEIKRTVAAPSVFIFPPSDEQLKSGTASVVCLLNNFYPREAKVQWKVDNAL |
| | | QSGNSQESVTEQDSKDSTYSLSSTLTLSKADYEKHKVYACEVTHQGLSSPV |
| | | TKSFNRGEC |
| 259 | 20906 | GACATCCAGATGACACAGTCCCCAAGCTCCCTGTCCGCCTCTGTGGGCG |
| | | ATAGGGTGACCATCACATGCAGAGCCTCTCAGAACGTGGGCACCAATG |
| | | TGGCCTGGTACCAGCAGAAGCCCGGCAAGGCCCCTAAGGCCCTGATCT |
| | | ACAGCGCCTCCTATAGGGACTCTGGAGTGCCTAGCCGCTTCTCTGGCAG |
| | | CGGCTCCGGAACCGACTTTACCCTGACAATCTCTAGCCTGCAGCCTGAG |
| | | GATTTCGCCACATACTATTGTCAGCAGTACAACTCCTATCCACTGACCTT |
| | | TGGCGGCGGCACAAAGGTGGAGATCAAGCGGACAGTGGCGGCGCCCAG |
| | | TGTCTTCATTTTTCCCCCTAGCGACGAACAGCTGAAGTCTGGGACAGCC |
| | | AGTGTGGTCTGTCTGCTGAACAACTTCTACCCTAGAGAGGCTAAAGTGC |
| | | AGTGGAAGGTCGATAACGCACTGCAGTCCGGAAATTCTCAGGAGAGTG |
| | | TGACTGAACAGGACTCAAAAGATAGCACCTATTCCCTGTCAAGCACACT |
| | | GACTCTGAGCAAGGCCGACTACGAGAAGCATAAAGTGTATGCTTGTGA |
| | | AGTCACCCACCAGGGGCTGAGTTCACCAGTCACAAAATCATTCAACAG |
| | | AGGGGAGTGC |
| 260 | 20907 | DIQMTQSPSSLSASVGDRVTVTCRASQNVGTNVAWYQQKPGKAPKALIYS |
| | | ASYRDSGVPSRFSGSGSGTDFTLTISSVQPEDFATYYCQQYNSYPLTFGGGT |
| | | KLEIKRTVAAPSVFIFPPSDEQLKSGTASVVCLLNNFYPREAKVQWKVDNA |
| | | LQSGNSQESVTEQDSKDSTYSLSSTLTLSKADYEKHKVYACEVTHQGLSSP |
| | | VTKSFNRGEC |
| 261 | 20907 | GACATCCAGATGACACAGTCCCCAAGCTCCCTGTCCGCCTCTGTGGGCG |
| | | ATAGGGTGACCGTGACATGCAGAGCCTCTCAGAACGTGGGCACCAATG |
| | | TGGCCTGGTACCAGCAGAAGCCCGGCAAGGCCCCTAAGGCCCTGATCT |
| | | ACAGCGCCTCCTATAGGGACTCTGGAGTGCCTAGCCGCTTCTCTGGCAG |
| | | CGGCTCCGGAACCGACTTTACCCTGACAATCTCTAGCGTGCAGCCTGAG |
| | | GATTTCGCCACATACTATTGTCAGCAGTACAACTCCTATCCACTGACCTT |
| | | TGGCGGCGGCACAAAGCTGGAGATCAAGCGGACAGTGGCGGCGCCCAG |
| | | TGTCTTCATTTTTCCCCCTAGCGACGAACAGCTGAAGTCTGGGACAGCC |
| | | AGTGTGGTCTGTCTGCTGAACAACTTCTACCCTAGAGAGGCTAAAGTGC |
| | | AGTGGAAGGTCGATAACGCACTGCAGTCCGGAAATTCTCAGGAGAGTG |
| | | TGACTGAACAGGACTCAAAAGATAGCACCTATTCCCTGTCAAGCACACT |
| | | GACTCTGAGCAAGGCCGACTACGAGAAGCATAAAGTGTATGCTTGTGA |
| | | AGTCACCCACCAGGGGCTGAGTTCACCAGTCACAAAATCATTCAACAG |
| | | AGGGGAGTGC |
| 262 | 20908 | DIQMTQSPSSLSASVGDRVTVTCRASQNVGTNVAWYQQKPGKAPKALIYS |
| | | ASYRDSGVPSRFSGSGSGTDFTLTISSVQPEDLATYYCQQYNSYPLTFGGGT |
| | | KLEIKRTVAAPSVFIFPPSDEQLKSGTASVVCLLNNFYPREAKVQWKVDNA |
| | | LQSGNSQESVTEQDSKDSTYSLSSTLTLSKADYEKHKVYACEVTHQGLSSP |
| | | VTKSFNRGEC |
| 263 | 20908 | GACATCCAGATGACACAGTCCCCAAGCTCCCTGTCCGCCTCTGTGGGCG |
| | | ATAGGGTGACCGTGACATGCAGAGCCTCTCAGAACGTGGGCACCAATG |
| | | TGGCCTGGTACCAGCAGAAGCCCGGCAAGGCCCCTAAGGCCCTGATCT |
| | | ACAGCGCCTCCTATAGGGACTCTGGAGTGCCTAGCCGCTTCTCTGGCAG |
| | | CGGCTCCGGAACCGACTTTACCCTGACAATCTCTAGCGTGCAGCCTGAG |
| | | GATCTGGCCACATACTATTGTCAGCAGTACAACTCCTATCCACTGACCT |
| | | TTGGCGGCGGCACAAAGCTGGAGATCAAGCGGACAGTGGCGGCGCCCA |
| | | GTGTCTTCATTTTTCCCCCTAGCGACGAACAGCTGAAGTCTGGGACAGC |
| | | CAGTGTGGTCTGTCTGCTGAACAACTTCTACCCTAGAGAGGCTAAAGTG |
| | | CAGTGGAAGGTCGATAACGCACTGCAGTCCGGAAATTCTCAGGAGAGT |
| | | GTGACTGAACAGGACTCAAAAGATAGCACCTATTCCCTGTCAAGCACAC |
| | | TGACTCTGAGCAAGGCCGACTACGAGAAGCATAAAGTGTATGCTTGTG |
| | | AAGTCACCCACCAGGGGCTGAGTTCACCAGTCACAAAATCATTCAACA |
| | | GAGGGGAGTGC |
| 264 | 16833 | EVQLVQSGAEVKKPGESLRISCKGSGYSFSTYWISWVRQMPGKGLEWMGK |
| | | IYPGDSYTNYSPSFQGQVTISADKSISTAYLQSSLKASDTAMYYCARGYGI |
| | | FDYWGQGTLVTVSSASTKGPSVFPLAPSSKSTSGGTAALGCLVKDYFPEPV |
| | | TVSWNSGALTSGVHTFPAVLQSSGLYSLSSVVTVPSSSLGTQTYICNVNHKP |
| | | SNTKVDKKVEPKSCDKTHTCPPCPAPEAAGGPSVFLFPPKPKDTLMISRTPE |
| | | VTCVVVSVSHEDPEVKFNWYVDGVEVHNAKTKPREEQYNSTYRVVSVLT |
| | | VLHQDWLNGKEYKCKVSNKALPAPIEKTISKAKGQPREPQVYVLPPSRDEL |
| | | TKNQVSLLCLVKGFYPSDIAVEWESNGQPENNYLTWPPVLDSDGSFFLYSK |
| | | LTVDKSRWQQGNVFSCSVMHEALHNHYTQKSLSLSPGGGGGQVQLVQSG |
| | | AEVKKPGASVKVSCKASGYSFTGYTMNWVRQAPGQGLEWMGLITPYNGA |
| | | SSYNQKFRGKATMTVDTSTSTVYMELSSLRSEDTAVYYCARGGYDGRGFD |
| | | YWGQGTLVTVSSGGGGSGGGGSGGGGSDIQMTQSPSSLSASVGDRVTITCS |
| | | ASSSYSYMHWYQQKSGKAPKLLIYDTSKLASGVPSRFSGSGSGTDFTLTISS |
| | | LQPEDFATYYCQQWSKHPLTFGQGTKLEIK |
| 265 | 16833 | GAGGTGCAGCTGGTGCAGAGCGGAGCAGAGGTGAAGAAGCCAGGCGA |
| | | GTCCCTGAGGATCTCTTGCAAGGGCAGCGGCTACAGCTTCTCCACCTAT |
| | | TGGATCTCCTGGGTGCGCCAGATGCCTGGCAAGGGACTGGAGTGGATG |
| | | GGCAAGATCTACCCCGGCGACAGCTACACAAACTATTCTCCTAGCTTTC |
| | | AGGGCCAGGTGACCATCTCCGCCGATAAGTCCATCTCTACAGCCTATCT |
| | | GCAGTGGAGCTCCCTGAAGGCCAGCGACACCGCCATGTACTATTGCGCC |
| | | AGAGGCTACGGCATCTTCGATTATTGGGGCCAGGGCACCCTGGTGACAG |
| | | TGTCTAGCGCTAGCACAAAGGGCCCAAGCGTGTTTCCTCTGGCCCCATC |
| | | CTCTAAGAGCACCTCCGGAGGAACAGCCGCCCTGGGCTGTCTGGTGAA |
| | | GGACTACTTCCCTGAGCCAGTGACCGTGTCCTGGAACTCTGGGGCCCTG |
| | | ACCAGCGGAGTGCACACATTTCCCGCCGTGCTGCAGAGCTCCGGACTGT |
| | | ACTCCCTGTCTAGCGTGGTGACCGTGCCTTCCTCTAGCCTGGGCACCCA |
| | | GACATATATCTGCAACGTGAATCACAAGCCTTCTAATACAAAGGTCGAC |
| | | AAGAAGGTGGAGCCAAAGAGCTGTGATAAGACCCACACATGCCCACCT |
| | | TGTCCGGCGCCAGAGGCCGCCGGAGGACCAAGCGTGTTCCTGTTTCCAC |
| | | CCAAGCCCAAGGACACCCTGATGATCTCCAGGACCCCTGAGGTGACAT |
| | | GCGTGGTGGTGTCTGTGAGCCACGAGGACCCAGAGGTGAAGTTCAACT |
| | | GGTACGTGGATGGCGTGGAGGTGCACAATGCCAAGACAAAGCCCAGAG |
| | | AGGAGCAGTACAATTCCACCTATCGCGTGGTGTCTGTGCTGACAGTGCT |
| | | GCACCAGGATTGGCTGAACGGCAAGGAGTATAAGTGCAAGGTGTCCAA |
| | | TAAGGCCCTGCCAGCCCCCATCGAGAAGACCATCTCTAAGGCCAAGGG |
| | | CCAGCCTCGCGAACCACAGGTGTACGTGCTGCCCCCTTCCAGGGACGAG |
| | | CTGACCAAGAACCAGGTGTCTCTGCTGTGCCTGGTGAAGGGCTTCTATC |
| | | CCTCTGATATCGCCGTGGAGTGGGAGAGCAATGGCCAGCCTGAGAACA |
| | | ATTACCTGACATGGCCACCCGTGCTGGACTCCGATGGCTCTTTCTTTCTG |
| | | TATAGCAAGCTGACCGTGGACAAGTCCCGCTGGCAGCAGGGCAACGTG |
| | | TTTTCCTGCTCTGTGATGCACGAGGCCCTGCACAATCACTACACCCAGA |
| | | AGAGCCTGAGCTTAAGCCCAGGAGGAGGAGGAGGACAGGTGCAGCTGG |
| | | TGCAGTCCGGAGCCGAGGTGAAGAAGCCTGGGGCCAGCGTGAAGGTGA |
| | | GCTGTAAGGCCAGCGGCTACTCCTTCACAGGCTATACCATGAACTGGGT |
| | | GCGGCAGGCCCCTGGACAGGGACTGGAGTGGATGGGCCTGATCACACC |
| | | ATACAACGGGGCCAGCTCCTATAATCAGAAGTTTAGGGGCAAGGCCAC |
| | | CATGACAGTGGACACCAGCACATCCACCGTGTATATGGAGCTGTCTAGC |
| | | CTGCGCAGCGAGGATACCGCCGTGTACTATTGCGCCAGAGGCGGATAC |
| | | GACGGCAGAGGCTTCGATTATTGGGGCCAGGGCACACTGGTGACCGTG |
| | | TCCTCTGGAGGAGGAGGCTCCGGCGGAGGAGGCTCTGGCGGCGGCGGC |
| | | AGCGACATCCAGATGACACAGTCCCCTAGCTCCCTGTCTGCCAGCGTGG |
| | | GCGATAGGGTGACAATCACCTGTTCCGCCTCTAGCTCCGTGTCTTACAT |
| | | GCACTGGTATCAGCAGAAGAGCGGCAAGGCCCCAAAGCTGCTGATCTA |
| | | CGATACCTCCAAGCTGGCCTCTGGCGTGCCCAGCAGATTCTCCGGCTCT |
| | | GGCAGCGGCACAGACTTTACACTGACCATCTCTAGCCTGCAGCCTGAGG |
| | | ATTTCGCCACCTACTATTGTCAGCAGTGGAGCAAGCACCCACTGACATT |
| | | TGGCCAGGGCACCAAGCTGGAGATCAAG |
| 266 | 16839 | EVQLVQSGAEVKKPGESLRISCKGSGYSFSTYWISWVRQMPGKGLEWMGK |
| | | IYPGDSYTNYSPSFQGQVTISADKSISTAYLQWSSLKASDTAMYYCARGYGI |
| | | FDYWGQGTLVTVSSASTKGPSVFPLAPSSKSTSGGTAALGCLVKDYFPEPV |
| | | TVSWNSGALTSGVHTFPAVLQSSGLYSLSSVVTVPSSSLGTQTYICNVNHKP |
| | | SNTKVDKKVEPKSCDKTHTCPPCPAPEAAGGPSVFLFPPKPKDTLMISRTPE |
| | | VTCVVVSVSHEDPEVKFNWYVDGVEVHNAKTKPREEQYNSTYRVVSVLT |
| | | VLHQDWLNGKEYKCKVSNKALPAPIEKTISKAKGQPREPQVYVLPPSRDEL |
| | | TKNQVSLLCLVKGFYPSDIAVEWESNGQPENNYLTWPPVLDSDGSFFLYSK |
| | | LTVDKSRWQQGNVFSCSVMHEALHNHYTQKSLSLSPGGGGGQVQLVQSG |
| | | AEVVKPGASVKMSCKASGYTFTGYNIHWVKQAPGQGLEWIGAIYPGNGD |
| | | TSYKQKFRGRATLTADTSTSTVYMELSSLRSEDSAVYYCARGETARATFAY |
| | | WGQGTLVTVSSGGGGSGGGGSGGGGSDIQMTQSPSSLSASVGDRVTITCSA |
| | | SQDIGNFLNWYQQKPGKTVKVLIYYTSSLYSGVPSRFSGSGSGTDYTLTISS |
| | | LQPEDFATYYCQQYSKLPLTFGQGTKLELK |
| 267 | 16839 | GAGGTGCAGCTGGTGCAGAGCGGAGCAGAGGTGAAGAAGCCAGGCGA |
| | | GTCCCTGAGGATCTCTTGCAAGGGCAGCGGCTACAGCTTCTCCACCTAT |
| | | TGGATCTCCTGGGTGCGCCAGATGCCTGGCAAGGGACTGGAGTGGATG |
| | | GGCAAGATCTACCCCGGCGACAGCTACACAAACTATTCTCCTAGCTTTC |
| | | AGGGCCAGGTGACCATCTCCGCCGATAAGTCCATCTCTACAGCCTATCT |
| | | GCAGTGGAGCTCCCTGAAGGCCAGCGACACCGCCATGTACTATTGCGCC |
| | | AGAGGCTACGGCATCTTCGATTATTGGGGCCAGGGCACCCTGGTGACAG |
| | | TGTCTAGCGCTAGCACAAAGGGCCCAAGCGTGTTTCCTCTGGCCCCATC |
| | | CTCTAAGAGCACCTCCGGAGGAACAGCCGCCCTGGGCTGTCTGGTGAA |
| | | GGACTACTTCCCTGAGCCAGTGACCGTGTCCTGGAACTCTGGGGCCCTG |
| | | ACCAGCGGAGTGCACACATTTCCCGCCGTGCTGCAGAGCTCCGGACTGT |
| | | ACTCCCTGTCTAGCGTGGTGACCGTGCCTTCCTCTAGCCTGGGCACCCA |
| | | GACATATATCTGCAACGTGAATCACAAGCCTTCTAATACAAAGGTCGAC |
| | | AAGAAGGTGGAGCCAAAGAGCTGTGATAAGACCCACACATGCCCACCT |
| | | TGTCCGGCGCCAGAGGCCGCCGGAGGACCAAGCGTGTTCCTGTTTCCAC |
| | | CCAAGCCCAAGGACACCCTGATGATCTCCAGGACCCCTGAGGTGACAT |
| | | GCGTGGTGGTGTCTGTGAGCCACGAGGACCCAGAGGTGAAGTTCAACT |
| | | GGTACGTGGATGGCGTGGAGGTGCACAATGCCAAGACAAAGCCCAGAG |
| | | AGGAGCAGTACAATTCCACCTATCGCGTGGTGTCTGTGCTGACAGTGCT |
| | | GCACCAGGATTGGCTGAACGGCAAGGAGTATAAGTGCAAGGTGTCCAA |
| | | TAAGGCCCTGCCAGCCCCCATCGAGAAGACCATCTCTAAGGCCAAGGG |
| | | CCAGCCTCGCGAACCACAGGTGTACGTGCTGCCCCCTTCCAGGGACGAG |
| | | CTGACCAAGAACCAGGTGTCTCTGCTGTGCCTGGTGAAGGGCTTCTATC |
| | | CCTCTGATATCGCCGTGGAGTGGGAGAGCAATGGCCAGCCTGAGAACA |
| | | ATTACCTGACATGGCCACCCGTGCTGGACAGCGATGGCTCCTTCTTTCT |
| | | GTATAGCAAGCTGACCGTGGACAAGTCCCGCTGGCAGCAGGGCAACGT |
| | | GTTTTCCTGCTCTGTGATGCACGAGGCCCTGCACAATCACTACACACAG |
| | | AAGAGCCTGAGCTTAAGCCCTGGAGGAGGAGGAGGACAGGTGCAGCTG |
| | | GTGCAGAGCGGAGCCGAGGTGGTGAAGCCAGGGGCCAGCGTGAAGATG |
| | | TCTTGTAAGGCCAGCGGCTACACCTTCACAGGCTATAACATCCACTGGG |
| | | TGAAGCAGGCCCCTGGACAGGGACTGGAGTGGATCGGAGCCATCTACC |
| | | CAGGCAATGGCGACACCTCCTATAAGCAGAAGTTTCGGGGCAGAGCCA |
| | | CCCTGACAGCCGATACCAGCACATCCACCGTGTACATGGAGCTGAGCTC |
| | | CCTGCGGTCTGAGGACAGCGCCGTGTACTATTGCGCCAGGGGCGAGAC |
| | | AGCAAGGGCCACCTTCGCCTATTGGGGACAGGGCACACTGGTGACCGT |
| | | GTCTAGCGGAGGAGGAGGCAGCGGAGGAGGAGGCTCCGGCGGCGGCG |
| | | GCTCTGATATCCAGATGACCCAGAGCCCTTCCTCTCTGTCTGCCAGCGT |
| | | GGGCGACAGGGTGACAATCACCTGTTCCGCCTCTCAGGATATCGGCAAC |
| | | TTCCTGAATTGGTACCAGCAGAAGCCCGGCAAGACAGTGAAGGTGCTG |
| | | ATCTACTATACCAGCTCCCTGTACTCCGGAGTGCCTAGCCGGTTCAGCG |
| | | GCTCCGGCTCTGGAACAGACTATACACTGACCATCTCTAGCCTGCAGCC |
| | | AGAGGATTTCGCCACCTACTATTGTCAGCAGTATTCCAAGCTGCCCCTG |
| | | ACATTTGGCCAGGGCACCAAGCTGGAGCTGAAG |
| 268 | 16840 | EVQLVQSGAEVKKPGESLRISCKGSGYSFSTYWISWVRQMPGKGLEWMGK |
| | | IYPGDSYTNYSPSFQGQVTISADKSISTAYLQWSSLKASDTAMYYCARGYGI |
| | | FDYWGQGTLVTVSSASTKGPSVFPLAPSSKSTSGGTAALGCLVKDYFPEPV |
| | | TVSWNSGALTSGVHTFPAVLQSSGLYSLSSVVTVPSSSLGTQTYICNVNHKP |
| | | SNTKVDKKVEPKSCDKTHTCPPCPAPEAAGGPSVFLFPPKPKDTLMISRTPE |
| | | VTCVVVSVSHEDPEVKFNWYVDGVEVHNAKTKPREEQYNSTYRVVSVLT |
| | | VLHQDWLNGKEYKCKVSNKALPAPIEKTISKAKGQPREPQVYVLPPSRDEL |
| | | TKNQVSLLCLVKGFYPSDIAVEWESNGQPENNYLTWPPVLDSDGSFFLYSK |
| | | LTVDKSRWQQGNVFSCSVMHEALHNHYTQKSLSLSPGGGGGDIQMTQSPS |
| | | SLSASVGDRVTITCSASQDIGNFLNWYQQKPGKTVKVLIYYTSSLYSGVPSR |
| | | FSGSGSGTDYTLTISSLQPEDFATYYCQQYSKLPLTFGQGTKLELKGGGGSG |
| | | GGGSGGGGSQVQLVQSGAEVVKPGASVKMSCKASGYTFTGYNIHWVKQA |
| | | PGQGLEWIGAIYPGNGDTSYKQKFRGRATLTADTSTSTVYMELSSLRSEDS |
| | | AVYYCARGETARATFAYWGQGTLVTVSS |
| 269 | 16840 | GAGGTGCAGCTGGTGCAGAGCGGAGCAGAGGTGAAGAAGCCAGGCGA |
| | | GTCCCTGAGGATCTCTTGCAAGGGCAGCGGCTACAGCTTCTCCACCTAT |
| | | TGGATCTCCTGGGTGCGCCAGATGCCTGGCAAGGGACTGGAGTGGATG |
| | | GGCAAGATCTACCCCGGCGACAGCTACACAAACTATTCTCCTAGCTTTC |
| | | AGGGCCAGGTGACCATCTCCGCCGATAAGTCCATCTCTACAGCCTATCT |
| | | GCAGTGGAGCTCCCTGAAGGCCAGCGACACCGCCATGTACTATTGCGCC |
| | | AGAGGCTACGGCATCTTCGATTATTGGGGCCAGGGCACCCTGGTGACAG |
| | | TGTCTAGCGCTAGCACAAAGGGCCCAAGCGTGTTTCCTCTGGCCCCATC |
| | | CTCTAAGAGCACCTCCGGAGGAACAGCCGCCCTGGGCTGTCTGGTGAA |
| | | GGACTACTTCCCTGAGCCAGTGACCGTGTCCTGGAACTCTGGGGCCCTG |
| | | ACCAGCGGAGTGCACACATTTCCCGCCGTGCTGCAGAGCTCCGGACTGT |
| | | ACTCCCTGTCTAGCGTGGTGACCGTGCCTTCCTCTAGCCTGGGCACCCA |
| | | GACATATATCTGCAACGTGAATCACAAGCCTTCTAATACAAAGGTCGAC |
| | | AAGAAGGTGGAGCCAAAGAGCTGTGATAAGACCCACACATGCCCACCT |
| | | TGTCCGGCGCCAGAGGCCGCCGGAGGACCAAGCGTGTTCCTGTTTCCAC |
| | | CCAAGCCCAAGGACACCCTGATGATCTCCAGGACCCCTGAGGTGACAT |
| | | GCGTGGTGGTGTCTGTGAGCCACGAGGACCCAGAGGTGAAGTTCAACT |
| | | GGTACGTGGATGGCGTGGAGGTGCACAATGCCAAGACAAAGCCCAGAG |
| | | AGGAGCAGTACAATTCCACCTATCGCGTGGTGTCTGTGCTGACAGTGCT |
| | | GCACCAGGATTGGCTGAACGGCAAGGAGTATAAGTGCAAGGTGTCCAA |
| | | TAAGGCCCTGCCAGCCCCCATCGAGAAGACCATCTCTAAGGCCAAGGG |
| | | CCAGCCTCGCGAACCACAGGTGTACGTGCTGCCCCCTTCCAGGGACGAG |
| | | CTGACCAAGAACCAGGTGTCTCTGCTGTGCCTGGTGAAGGGCTTCTATC |
| | | CCTCTGATATCGCCGTGGAGTGGGAGAGCAATGGCCAGCCTGAGAACA |
| | | ATTACCTGACATGGCCACCCGTGCTGGACAGCGATGGCTCCTTCTTTCT |
| | | GTATAGCAAGCTGACCGTGGACAAGTCCCGCTGGCAGCAGGGCAACGT |
| | | GTTTTCCTGCTCTGTGATGCACGAGGCCCTGCACAATCACTACACACAG |
| | | AAGAGCCTGAGCTTAAGCCCAGGAGGAGGAGGAGGCGATATCCAGATG |
| | | ACCCAGAGCCCAAGCTCCCTGAGCGCCTCCGTGGGCGACCGGGTGACC |
| | | ATCACATGTTCTGCCAGCCAGGATATCGGCAACTTCCTGAATTGGTATC |
| | | AGCAGAAGCCCGGCAAGACAGTGAAGGTGCTGATCTACTATACCTCTA |
| | | GCCTGTACTCCGGCGTGCCTTCTAGATTTTCCGGCTCTGGCAGCGGCAC |
| | | AGACTATACCCTGACAATCTCCTCTCTGCAGCCTGAGGATTTCGCCACC |
| | | TACTATTGCCAGCAGTACAGCAAGCTGCCACTGACATTTGGCCAGGGCA |
| | | CCAAGCTGGAGCTGAAGGGAGGAGGAGGCAGCGGCGGCGGAGGCTCC |
| | | GGCGGCGGCGGCTCTCAGGTGCAGCTGGTGCAGTCCGGAGCCGAGGTG |
| | | GTGAAGCCTGGGGCCAGCGTGAAGATGTCCTGTAAGGCCTCTGGCTACA |
| | | CCTTCACAGGCTATAACATCCACTGGGTGAAGCAGGCCCCTGGACAGG |
| | | GACTGGAGTGGATCGGAGCCATCTACCCAGGCAATGGCGACACCTCCT |
| | | ATAAGCAGAAGTTTCGGGGCAGAGCCACCCTGACAGCCGATACCTCCA |
| | | CATCTACCGTGTACATGGAGCTGAGCTCCCTGCGGTCTGAGGACAGCGC |
| | | CGTGTACTATTGTGCCAGGGGCGAGACAGCAAGGGCCACCTTCGCCTAT |
| | | TGGGGACAGGGCACACTGGTGACCGTGTCTAGC |
| 270 | 16841 | EVQLVQSGAEVKKPGESLRISCKGSGYSFSTYWISWVRQMPGKGLEWMGK |
| | | IYPGDSYTNYSPSFQGQVTISADKSISTAYLQWSSLKASDTAMYYCARGYGI |
| | | FDYWGQGTLVTVSSASTKGPSVFPLAPSSKSTSGGTAALGCLVKDYFPEPV |
| | | TVSWNSGALTSGVHTFPAVLQSSGLYSLSSVVTVPSSSLGTQTYICNVNHKP |
| | | SNTKVDKKVEPKSCDKTHTCPPCPAPEAAGGPSVFLFPPKPKDTLMISRTPE |
| | | VTCVVVSVSHEDPEVKFNWYVDGVEVHNAKTKPREEQYNSTYRVVSVLT |
| | | VLHQDWLNGKEYKCKVSNKALPAPIEKTISKAKGQPREPQVYVLPPSRDEL |
| | | TKNQVSLLCLVKGFYPSDIAVEWESNGQPENNYLTWPPVLDSDGSFFLYSK |
| | | LTVDKSRWQQGNVFSCSVMHEALHNHYTQKSLSLSPGGGGGEVQLVESG |
| | | GGLVQPGGSLRLSCAASGFSFSDFAMSWVRQAPGKGLEWVATIGRVAFHT |
| | | YYPDSMKGRFTISRDNSKNTLYLQMNSLRAEDTAVYYCARHRGFDVGHFD |
| | | FWGQGTLVTVSSGGGGSGGGGSGGGGSDIQMTQSPSSLSASVGDRVTITCR |
| | | SSETLVHSSGNTYLEWYQQKPGKAPKLLIYRVSNRFSGVPSRFSGSGSGTDF |
| | | TLTISSLQPEDFATYYCFQGSFNPLTFGQGTKVEIK |
| 271 | 16841 | GAGGTGCAGCTGGTGCAGAGCGGAGCAGAGGTGAAGAAGCCAGGCGA |
| | | GTCCCTGAGGATCTCTTGCAAGGGCAGCGGCTACAGCTTCTCCACCTAT |
| | | TGGATCTCCTGGGTGCGCCAGATGCCTGGCAAGGGACTGGAGTGGATG |
| | | GGCAAGATCTACCCCGGCGACAGCTACACAAACTATTCTCCTAGCTTTC |
| | | AGGGCCAGGTGACCATCTCCGCCGATAAGTCCATCTCTACAGCCTATCT |
| | | GCAGTGGAGCTCCCTGAAGGCCAGCGACACCGCCATGTACTATTGCGCC |
| | | AGAGGCTACGGCATCTTCGATTATTGGGGCCAGGGCACCCTGGTGACAG |
| | | TGTCTAGCGCTAGCACAAAGGGCCCAAGCGTGTTTCCTCTGGCCCCATC |
| | | CTCTAAGAGCACCTCCGGAGGAACAGCCGCCCTGGGCTGTCTGGTGAA |
| | | GGACTACTTCCCTGAGCCAGTGACCGTGTCCTGGAACTCTGGGGCCCTG |
| | | ACCAGCGGAGTGCACACATTTCCCGCCGTGCTGCAGAGCTCCGGACTGT |
| | | ACTCCCTGTCTAGCGTGGTGACCGTGCCTTCCTCTAGCCTGGGCACCCA |
| | | GACATATATCTGCAACGTGAATCACAAGCCTTCTAATACAAAGGTCGAC |
| | | AAGAAGGTGGAGCCAAAGAGCTGTGATAAGACCCACACATGCCCACCT |
| | | TGTCCGGCGCCAGAGGCCGCCGGAGGACCAAGCGTGTTCCTGTTTCCAC |
| | | CCAAGCCCAAGGACACCCTGATGATCTCCAGGACCCCTGAGGTGACAT |
| | | GCGTGGTGGTGTCTGTGAGCCACGAGGACCCAGAGGTGAAGTTCAACT |
| | | GGTACGTGGATGGCGTGGAGGTGCACAATGCCAAGACAAAGCCCAGAG |
| | | AGGAGCAGTACAATTCCACCTATCGCGTGGTGTCTGTGCTGACAGTGCT |
| | | GCACCAGGATTGGCTGAACGGCAAGGAGTATAAGTGCAAGGTGTCCAA |
| | | TAAGGCCCTGCCAGCCCCCATCGAGAAGACCATCTCTAAGGCCAAGGG |
| | | CCAGCCTCGCGAACCTCAGGTGTACGTGCTGCCACCTAGCCGGGACGAG |
| | | CTGACCAAGAACCAGGTGTCCCTGCTGTGCCTGGTGAAGGGCTTCTATC |
| | | CCTCCGATATCGCCGTGGAGTGGGAGTCTAATGGCCAGCCTGAGAACA |
| | | ATTACCTGACCTGGCCACCCGTGCTGGACTCCGATGGCTCTTTCTTTCTG |
| | | TATTCTAAGCTGACAGTGGACAAGAGCAGGTGGCAGCAGGGCAACGTG |
| | | TTTTCCTGCTCTGTGATGCACGAGGCCCTGCACAATCACTACACCCAGA |
| | | AGAGCCTGAGCTTAAGCCCTGGAGGAGGAGGAGGAGAGGTGCAGCTGG |
| | | TGGAGAGCGGCGGCGGCCTGGTGCAGCCAGGCGGCAGCCTGCGCCTGT |
| | | CCTGTGCCGCCTCTGGCTTCAGCTTTTCCGACTTCGCCATGAGCTGGGTG |
| | | CGGCAGGCCCCCGGCAAGGGACTGGAGTGGGTGGCCACCATCGGCAGA |
| | | GTGGCCTTCCACACATACTATCCTGACTCTATGAAGGGCCGGTTTACCA |
| | | TCAGCAGAGATAACTCCAAGAATACACTGTATCTGCAGATGAACAGCCT |
| | | GCGGGCCGAGGATACCGCCGTGTACTATTGCGCAAGGCACAGAGGCTT |
| | | TGACGTGGGACACTTCGATTTTTGGGGCCAGGGCACCCTGGTGACAGTG |
| | | AGCTCCGGCGGCGGCGGCTCTGGAGGAGGAGGCAGCGGCGGAGGAGG |
| | | CTCCGACATCCAGATGACACAGTCCCCATCTAGCCTGTCTGCCAGCGTG |
| | | GGCGATAGGGTGACCATCACATGTCGCTCCTCTGAGACCCTGGTGCACA |
| | | GCTCCGGCAACACATACCTGGAGTGGTATCAGCAGAAGCCTGGCAAGG |
| | | CCCCAAAGCTGCTGATCTACAGGGTGTCTAATCGCTTCAGCGGCGTGCC |
| | | CTCCAGATTTTCCGGCTCTGGCAGCGGAACCGACTTCACCCTGACAATC |
| | | TCTAGCCTGCAGCCAGAGGATTTTGCCACATACTATTGTTTCCAGGGCA |
| | | GCTTTAATCCCCTGACCTTCGGCCAGGGCACAAAGGTGGAGATCAAG |
| 272 | 16843 | EVQLVQSGAEVKKPGESLRISCKGSGYSFSTYWISWVRQMPGKGLEWMGK |
| | | IYPGDSYTNYSPSFQGQVTISADKSISTAYLQWSSLKASDTAMYYCARGYGI |
| | | FDYWGQGTLVTVSSASTKGPSVFPLAPSSKSTSGGTAALGCLVKDYFPEPV |
| | | TVSWNSGALTSGVHTFPAVLQSSGLYSLSSVVTVPSSSLGTQTYICNVNHKP |
| | | SNTKVDKKVEPKSCDKTHTCPPCPAPEAAGGPSVFLFPPKPKDTLMISRTPE |
| | | VTCVVVSVSHEDPEVKFNWYVDGVEVHNAKTKPREEQYNSTYRVVSVLT |
| | | VLHQDWLNGKEYKCKVSNKALPAPIEKTISKAKGQPREPQVYVLPPSRDEL |
| | | TKNQVSLLCLVKGFYPSDIAVEWESNGQPENNYLTWPPVLDSDGSFFLYSK |
| | | LTVDKSRWQQGNVFSCSVMHEALHNHYTQKSLSLSPGGGGGQVQLVQSG |
| | | AEVVKPGASVKISCKASGYTFTGYFMNWVKQSPGQSLEWIGRIHPYDGDT |
| | | FYNQKFQGKATLTVDKSSNTAHMELLSLTSEDFAVYYCTRYDGSRAMDY |
| | | WGQGTTVTVSSGGGGSGGGGSGGGGSDIVLTQSPLSLAVSLGQPAIISCKA |
| | | SQSVSFAGTSLMHWYHQKPGQQPRLLIYRASNLEAGVPDRFSGSGSKTDFT |
| | | LTISPVEAEDAATYYCQQSREYPYTFGGGTKLEIK |
| 273 | 16843 | GAGGTGCAGCTGGTGCAGAGCGGAGCAGAGGTGAAGAAGCCAGGCGA |
| | | GTCCCTGAGGATCTCTTGCAAGGGCAGCGGCTACAGCTTCTCCACCTAT |
| | | TGGATCTCCTGGGTGCGCCAGATGCCTGGCAAGGGACTGGAGTGGATG |
| | | GGCAAGATCTACCCCGGCGACAGCTACACAAACTATTCTCCTAGCTTTC |
| | | AGGGCCAGGTGACCATCTCCGCCGATAAGTCCATCTCTACAGCCTATCT |
| | | GCAGTGGAGCTCCCTGAAGGCCAGCGACACCGCCATGTACTATTGCGCC |
| | | AGAGGCTACGGCATCTTCGATTATTGGGGCCAGGGCACCCTGGTGACAG |
| | | TGTCTAGCGCTAGCACAAAGGGCCCAAGCGTGTTTCCTCTGGCCCCATC |
| | | CTCTAAGAGCACCTCCGGAGGAACAGCCGCCCTGGGCTGTCTGGTGAA |
| | | GGACTACTTCCCTGAGCCAGTGACCGTGTCCTGGAACTCTGGGGCCCTG |
| | | ACCAGCGGAGTGCACACATTTCCCGCCGTGCTGCAGAGCTCCGGACTGT |
| | | ACTCCCTGTCTAGCGTGGTGACCGTGCCTTCCTCTAGCCTGGGCACCCA |
| | | GACATATATCTGCAACGTGAATCACAAGCCTTCTAATACAAAGGTCGAC |
| | | AAGAAGGTGGAGCCAAAGAGCTGTGATAAGACCCACACATGCCCACCT |
| | | TGTCCGGCGCCAGAGGCCGCCGGAGGACCAAGCGTGTTCCTGTTTCCAC |
| | | CCAAGCCCAAGGACACCCTGATGATCTCCAGGACCCCTGAGGTGACAT |
| | | GCGTGGTGGTGTCTGTGAGCCACGAGGACCCAGAGGTGAAGTTCAACT |
| | | GGTACGTGGATGGCGTGGAGGTGCACAATGCCAAGACAAAGCCCAGAG |
| | | AGGAGCAGTACAATTCCACCTATCGCGTGGTGTCTGTGCTGACAGTGCT |
| | | GCACCAGGATTGGCTGAACGGCAAGGAGTATAAGTGCAAGGTGTCCAA |
| | | TAAGGCCCTGCCAGCCCCCATCGAGAAGACCATCTCTAAGGCCAAGGG |
| | | CCAGCCTCGCGAACCCCAGGTGTACGTGCTGCCCCCTTCTAGGGACGAG |
| | | CTGACCAAGAACCAGGTGAGCCTGCTGTGCCTGGTGAAGGGCTTCTATC |
| | | CTTCCGATATCGCCGTGGAGTGGGAGTCTAATGGCCAGCCAGAGAACA |
| | | ATTACCTGACCTGGCCACCCGTGCTGGACAGCGATGGCTCCTTCTTTCTG |
| | | TATTCTAAGCTGACAGTGGACAAGAGCCGCTGGCAGCAGGGCAACGTG |
| | | TTTTCCTGCTCTGTGATGCACGAGGCCCTGCACAATCACTACACCCAGA |
| | | AGAGCCTGAGCTTAAGCCCAGGAGGAGGAGGAGGACAGGTGCAGGGG |
| | | TGCAGTCCGGAGCCGAGGTGGTGAAGCCTGGGGCCAGCGTGAAGATCT |
| | | CCTGTAAGGCCTCTGGCTACACCTTCACAGGCTACTTCATGAACTGGGT |
| | | GAAGCAGAGCCCAGGCCAGTCCCTGGAGTGGATCGGCAGAATCCACCC |
| | | CTACGACGGCGATACATTCTATAACCAGAAGTTTCAGGGCAAGGCCACC |
| | | CTGACCGTGGACAAAAGCTCCAATACCGCCCACATGGAGCTGCTGTCTC |
| | | TGACAAGCGAGGATTTCGCCGTGTACTATTGCACCCGGTACGACGGCAG |
| | | CAGAGCCATGGATTATTGGGGCCAGGGCACCACAGTGACAGTGTCTAG |
| | | CGGCGGCGGCGGCTCTGGAGGAGGAGGCAGCGGCGGAGGAGGCTCCG |
| | | ACATCGTGCTGACCCAGTCCCCACTGTCTCTGGCCGTGAGCCTGGGCCA |
| | | GCCTGCCATCATCTCCTGTAAGGCCAGCCAGAGCGTGAGCTTCGCCGGG |
| | | ACCAGCCTGATGCACTGGTACCACCAGAAGCCTGGCCAGCAGCCAAGG |
| | | CTGCTGATCTATAGGGCCAGCAATCTGGAGGCCGGAGTGCCAGACCGG |
| | | TTCAGCGGCTCCGGCTCTAAGACCGACTTCACCCTGACAATCTCCCCTG |
| | | TGGAGGCAGAGGATGCAGCAACATACTATTGTCAGCAGTCTAGAGAGT |
| | | ACCCATATACCTTTGGCGGCGGCACAAAGCTGGAGATCAAG |
| 274 | 8653 | QSVLTQPPSASGTPGQRVTISCSGSSSNIGTNYVYWYQQFPGTAPKLLIYRS |
| | | YQRPSGVPDRFSGSKSGSSASLAISGLQSEDEADYYCATWDDSLDGWVFG |
| | | GGTKLTVLRQPKAAPSVTLFPPSSEELQANKATLVCLISDFYPGAVTVAWK |
| | | ADSSPVKAGVETTTPSKQSNNKYAASSYLSLTPEQWKSHRSYSCQVTHEGS |
| | | TVEKTVAPTECS |
| 275 | 8653 | CAGAGCGTCCTGACTCAGCCTCCCTCCGCCTCCGGAACACCTGGGCAGA |
| | | GAGTGACTATCTCCTGTAGCGGATCAAGCTCAAACATTGGAACCAACTA |
| | | CGTGTATTGGTACCAGCAGTTCCCCGGCACAGCTCCTAAGCTGCTGATC |
| | | TATCGGAGCTACCAGAGACCAAGCGGGGTCCCCGACAGGTTTTCTGGCA |
| | | GTAAATCAGGGAGCTCCGCCAGCCTGGCTATTTCCGGCCTGCAGTCTGA |
| | | GGACGAAGCAGATTACTATTGCGCCACCTGGGACGATTCCCTGGATGGA |
| | | TGGGTCTTCGGCGGCGGCACAAAACTGACCGTCCTGAGGCAGCCAAAG |
| | | GCGGCGCCCAGTGTCACACTGTTTCCCCCTAGCTCCGAGGAACTGCAGG |
| | | CTAACAAAGCAACACTGGTGTGTCTGATCAGCGACTTCTACCCTGGAGC |
| | | TGTGACTGTCGCCTGGAAGGCTGATTCTAGTCCAGTGAAAGCAGGCGTC |
| | | GAGACCACAACTCCCTCTAAGCAGAGTAACAACAAGTACGCAGCCTCA |
| | | AGCTATCTGTCACTGACCCCAGAACAGTGGAAGAGCCACCGGAGCTATT |
| | | CCTGCCAGGTCACTCACGAAGGCTCCACTGTCGAGAAAACCGTCGCTCC |
| | | CACCGAATGTTCA |
| 276 | 14413 | DIVMTQAAFSNPVTLGTSASISCRSNKSLLHSDGITYLQRPGQSPQLLI |
| | | YRMSNLASGVPDRFSGSGSGTDFTLRISRVEAEDVGVYYCAQMVEFPRTFG |
| | | GGTKLEIKRTVAAPSVFIFPPSDEQLKSGTASVVCLLNNFYPREAKVQWKV |
| | | DNALQSGNSQESVTEQDSKDSTYSLSSTLTLSKADYEKHKVYACEVTHQG |
| | | LSSPVTKSFNRGEC |
| 277 | 14413 | GACATCGTGATGACACAGGCCGCCTTTAGCAACCCCGTGACCCTGGGCA |
| | | CAAGCGCCTCCATCTCTTGCCGGAGCAATAAGTCCCTGCTGCACTCCGA |
| | | TGGCATCACCTACCTGTTCTGGTATCTGCAGAGGCCCGGCCAGTCTCCT |
| | | CAGCTGCTGATCTACCGCATGTCTAACCTGGCCAGCGGAGTGCCTGACC |
| | | GGTTCAGCGGCTCCGGCTCTGGAACCGACTTCACCCTGCGGATCTCCAG |
| | | AGTGGAGGCCGAGGACGTGGGCGTGTACTATTGTGCCCAGATGGTGGA |
| | | GTTCCCAAGAACCTTTGGCGGCGGCACAAAGCTGGAGATCAAGAGGAC |
| | | AGTGGCGGCGCCCAGTGTCTTCATTTTTCCCCCTAGCGACGAACAGCTG |
| | | AAGTCTGGGACAGCCAGTGTGGTCTGTCTGCTGAACAACTTCTACCCTA |
| | | GAGAGGCTAAAGTGCAGTGGAAGGTCGATAACGCACTGCAGTCCGGAA |
| | | ATTCTCAGGAGAGTGTGACTGAACAGGACTCAAAAGATAGCACCTATTC |
| | | CCTGTCAAGCACACTGACTCTGAGCAAGGCCGACTACGAGAAGCATAA |
| | | AGTGTATGCTTGTGAAGTCACCCACCAGGGGCTGAGTTCACCAGTCACA |
| | | AAATCATTCAACAGAGGGGAGTGC |
| 278 | 8656 | QVQLVQSGAEVKKPGASVRVSCRASGYIFTESGITWVRQAPGQGLEWMG |
| | | WISGYSGDTKYAQKLQGRVTMTKDTSTTTAYMELRSLRYDDTAVYYCAR |
| | | DVQYSGSYLGAYYFDYWSPGTLVTVSSASTKGPSVFPLAPSSKSTSGGTAA |
| | | LGCLVKDYFPEPVTVSWNSGALTSGVHTFPAVLQSSGLYSLSSVVTVPSSSL |
| | | GTQTYICNVNHKPSNTKVDKKVEPKSCDKTHTCPPCPAPELLGGPSVFLFPP |
| | | KPKDTLMISRTPEVTCVVVDVSHEDPEVKFNWYVDGVEVHNAKTKPREEQ |
| | | YNSTYRVVSVLTVLHQDWLNGKEYKCKVSNKALPAPIEKTISKAKGQPRE |
| | | PQVYVYPPSRDELTKNQVSLTCLVKGFYPSDIAVEWESNGQPENNYKTTPP |
| | | VLDSDGSFALVSKLTVDKSRWQQGNVFSCSVMHEALHNHYTQKSLSLSPG |
| 279 | 8656 | CAGGTGCAGCTGGTCCAGTCCGGGGCTGAAGTGAAAAAACCTGGGGCA |
| | | TCCGTGCGGGTGTCATGTCGGGCAAGCGGGTATATCTTTACTGAGTCTG |
| | | GAATCACCTGGGTGAGGCAGGCTCCCGGACAGGGACTGGAATGGATGG |
| | | GATGGATTTCTGGATACAGTGGCGACACAAAGTATGCACAGAAACTGC |
| | | AGGGCCGCGTCACCATGACAAAGGATACTTCAACCACAACTGCCTACAT |
| | | GGAGCTGCGGAGCCTGAGATATGACGATACAGCCGTGTACTATTGCGCC |
| | | CGGGACGTGCAGTACAGCGGGTCCTACCTGGGGGCATACTACTTCGATT |
| | | ACTGGTCACCTGGAACTCTGGTCACCGTCTCTTCAGCTAGCACCAAGGG |
| | | CCCTTCTGTGTTTCCACTGGCACCCTCAAGCAAAAGCACCTCCGGAGGA |
| | | ACAGCAGCACTGGGATGTCTGGTCAAGGACTATTTCCCCGAGCCTGTGA |
| | | CCGTCTCATGGAATAGCGGCGCACTGACTAGTGGGGTGCACACCTTTCC |
| | | CGCCGTCCTGCAGTCCTCTGGGCTGTACAGCCTGAGTTCAGTGGTCACA |
| | | GTGCCAAGCTCCTCTCTGGGAACTCAGACCTATATCTGCAACGTCAATC |
| | | ATAAACCCAGCAACACAAAGGTCGACAAGAAAGTGGAGCCCAAGAGCT |
| | | GTGATAAAACTCATACCTGCCCACCTTGTCCGGCGCCAGAACTGCTGGG |
| | | AGGACCAAGCGTGTTCCTGTTTCCACCCAAGCCTAAAGACACCCTGATG |
| | | ATTTCCCGGACTCCTGAGGTCACCTGCGTGGTCGTGGACGTGTCTCACG |
| | | AGGACCCCGAAGTCAAGTTCAACTGGTACGTGGATGGCGTCGAAGTGC |
| | | ATAATGCCAAGACCAAACCCCGGGAGGAACAGTACAACTCTACCTATA |
| | | GAGTCGTGAGTGTCCTGACAGTGCTGCACCAGGACTGGCTGAATGGGA |
| | | AGGAGTATAAGTGTAAAGTGAGCAACAAAGCCCTGCCCGCCCCAATCG |
| | | AAAAAACAATCTCTAAAGCAAAAGGACAGCCTCGCGAACCACAGGTCT |
| | | ACGTCTACCCCCCATCAAGAGATGAACTGACAAAAAATCAGGTCTCTCT |
| | | GACATGCCTGGTCAAAGGATTCTACCCTTCCGACATCGCCGTGGAGTGG |
| | | GAAAGTAACGGCCAGCCCGAGAACAATTACAAGACCACACCCCCTGTC |
| | | CTGGACTCTGATGGGAGTTTCGCTCTGGTGTCAAAGCTGACCGTCGATA |
| | | AAAGCCGGTGGCAGCAGGGCAATGTGTTTAGCTGCTCCGTCATGCACGA |
| | | AGCCCTGCACAATCACTACACACAGAAGTCCCTGAGCCTGAGCCCTGGC |
| 280 | 4561 | DIQMTQSPSSLSASVGDRVTITCRASQDVNTAVAWYQQKPGKAPKLLIYSA |
| | | SFLYSGVPSRFSGSRSGTDFTLTISSLQPEDFATYYCQQHYTTPPTFGQGTKV |
| | | EIKRTVAAPSVFIFPPSDEQLKSGTASVVCLLNNFYPREAKVQWKVDNALQ |
| | | SGNSQESVTEQDSKDSTYSLSSTLTLSKADYEKHKVYACEVTHQGLSSPVT |
| | | KSFNRGEC |
| 281 | 4561 | GATATTCAGATGACCCAGTCCCCTAGCTCCCTGTCCGCTTCTGTGGGCG |
| | | ACAGGGTCACTATCACCTGCCGCGCATCTCAGGATGTGAACACCGCAGT |
| | | CGCCTGGTACCAGCAGAAGCCTGGGAAAGCTCCAAAGCTGCTGATCTA |
| | | CAGTGCATCATTCCTGTATTCAGGAGTGCCCAGCCGGTTTAGCGGCAGC |
| | | AGATCTGGCACCGACTTCACACTGACTATCTCTAGTCTGCAGCCTGAGG |
| | | ATTTTGCCACATACTATTGCCAGCAGCACTATACCACACCCCCTACTTTC |
| | | GGCCAGGGGACCAAAGTGGAGATCAAGCGAACTGTGGCCGCTCCAAGC |
| | | GTCTTCATTTTTCCACCCAGCGACGAACAGCTGAAATCCGGCACAGCTT |
| | | CTGTGGTCTGTCTGCTGAACAACTTCTACCCCAGAGAGGCCAAAGTGCA |
| | | GTGGAAGGTCGATAACGCTCTGCAGAGTGGCAACAGCCAGGAGAGCGT |
| | | GACAGAACAGGACTCCAAAGATTCTACTTATAGTCTGTCAAGCACCCTG |
| | | ACACTGAGCAAGGCAGACTACGAAAAGCATAAAGTGTATGCCTGTGAG |
| | | GTGACCCATCAGGGGCTGTCTTCTCCCGTGACCAAGTCTTTCAACCGAG |
| | | GCGAATGT |
| 282 | 8659 | QVQLVQSGAEVKKPGASVRVSCRASGYIFTESGITWVRQAPGQGLEWMG |
| | | WISGYSGDTKYAQKLQGRVTMTKDTSTTTAYMELRSLRYDDTAVYYCAR |
| | | DVQYSGSYLGAYYFDYWSPGTLVTVSSASTKGPSVFPLAPSSKSTSGGTAA |
| | | LGCLVKDYFPEPVTVSWNSGALTSGVHTFPAVLQSSGLYSLSSVVTVPSSSL |
| | | GTQTYICNVNHKPSNTKVDKKVEPKSCDKTHTCPPCPAPELLGGPSVFLFPP |
| | | KPKDTLMISRTPEVTCVVVDVSHEDPEVKFNWYVDGVEVHNAKTKPREEQ |
| | | YNSTYRVVSVLTVLHQDWLNGKEYKCKVSNKALPAPIEKTISKAKGQPRE |
| | | PQVYVLPPSRDELTKNQVSLLCLVKGFYPSDIAVEWESNGQPENNYLTWPP |
| | | VLDSDGSFFLYSKLTVDKSRWQQGNVFSCSVMHEALHNHYTQKSLSLSPG |
| 283 | 8659 | CAGGTGCAGCTGGTCCAGTCCGGGGCTGAAGTGAAAAAACCTGGGGCA |
| | | TCCGTGCGGGTGTCATGTCGGGCAAGCGGGTATATCTTTACTGAGTCTG |
| | | GAATCACCTGGGTGAGGCAGGCTCCCGGACAGGGACTGGAATGGATGG |
| | | GATGGATTTCTGGATACAGTGGCGACACAAAGTATGCACAGAAACTGC |
| | | AGGGCCGCGTCACCATGACAAAGGATACTTCAACCACAACTGCCTACAT |
| | | GGAGCTGCGGAGCCTGAGATATGACGATACAGCCGTGTACTATTGCGCC |
| | | CGGGACGTGCAGTACAGCGGGTCCTACCTGGGGGCATACTACTTCGATT |
| | | ACTGGTCACCTGGAACTCTGGTCACCGTCTCTTCAGCTAGCACCAAGGG |
| | | CCCTTCTGTGTTTCCACTGGCACCCTCAAGCAAAAGCACCTCCGGAGGA |
| | | ACAGCAGCACTGGGATGTCTGGTCAAGGACTATTTCCCCGAGCCTGTGA |
| | | CCGTCTCATGGAATAGCGGCGCACTGACTAGTGGGGTGCACACCTTTCC |
| | | CGCCGTCCTGCAGTCCTCTGGGCTGTACAGCCTGAGTTCAGTGGTCACA |
| | | GTGCCAAGCTCCTCTCTGGGAACTCAGACCTATATCTGCAACGTCAATC |
| | | ATAAACCCAGCAACACAAAGGTCGACAAGAAAGTGGAGCCCAAGAGCT |
| | | GTGATAAAACTCATACCTGCCCACCTTGTCCGGCGCCAGAACTGCTGGG |
| | | AGGACCAAGCGTGTTCCTGTTTCCACCCAAGCCTAAAGACACCCTGATG |
| | | ATTTCCCGGACTCCTGAGGTCACCTGCGTGGTCGTGGACGTGTCTCACG |
| | | AGGACCCCGAAGTCAAGTTCAACTGGTACGTGGATGGCGTCGAAGTGC |
| | | ATAATGCCAAGACCAAACCCCGGGAGGAACAGTACAACTCTACCTATA |
| | | GAGTCGTGAGTGTCCTGACAGTGCTGCACCAGGACTGGCTGAATGGGA |
| | | AGGAGTATAAGTGTAAAGTGAGCAACAAAGCCCTGCCCGCCCCAATCG |
| | | AAAAAACAATCTCTAAAGCAAAAGGACAGCCTCGCGAACCACAGGTCT |
| | | ACGTGCTGCCCCCTAGCCGCGACGAACTGACTAAAAATCAGGTCTCTCT |
| | | GCTGTGTCTGGTCAAAGGATTCTACCCTTCCGACATCGCCGTGGAGTGG |
| | | GAAAGTAACGGCCAGCCCGAGAACAATTACCTGACCTGGCCCCCTGTG |
| | | CTGGACTCTGATGGGAGTTTCTTTCTGTATTCAAAGCTGACAGTCGATA |
| | | AAAGCCGGTGGCAGCAGGGCAATGTGTTCAGCTGCTCCGTCATGCACG |
| | | AAGCACTGCACAACCATTACACTCAGAAGTCCCTGTCCCTGTCACCTGG |
| | | C |
| 284 | 16855 | EVQLVQSGAEVKKPGESLRISCKGSGYSFSTYWISWVRQMPGKGLEWMGK |
| | | IYPGDSYTNYSPSFQGQVTISADKSISTAYLQWSSLKASDTAMYYCARGYGI |
| | | FDYWGQGTLVTVSSASTKGPSVFPLAPSSKSTSGGTAALGCLVKDYFPEPV |
| | | TVSWNSGALTSGVHTFPAVLQSSGLYSLSSVVTVPSSSLGTQTYICNVNHKP |
| | | SNTKVDKKVEPKSCDKTHTCPPCPAPEAAGGPSVFLFPPKPKDTLMISRTPE |
| | | VTCVVVSVSHEDPEVKFNWYVDGVEVHNAKTKPREEQYNSTYRVVSVLT |
| | | VLHQDWLNGKEYKCKVSNKALPAPIEKTISKAKGQPREPQVYVYPPSRDEL |
| | | TKNQVSLTCLVKGFYPSDIAVEWESNGQPENNYKTTPPVLDSDGSFALVSK |
| | | LTVDKSRWQQGNVFSCSVMHEALHNHYTQKSLSLSPGGGGGQVQLVQSG |
| | | AEVKKPGASVKVSCKASGYSFTGYTMNWVRQAPGQGLEWMGLITPYNGA |
| | | SSYNQKFRGKATMTVDTSTSTVYMELSSLRSEDTAVYYCARGGYDGRGFD |
| | | YWGQGTLVTVSSGGGGSGGGGSGGGGSDIQMTQSPSSLSASVGDRVTITCS |
| | | ASSSVSYMHWYQQKSGKAPKLLIYDTSKLASGVPSRFSGSGSGTDFTLTISS |
| | | LQPEDFATYYCQQWSKHPLTFGQGTKLEIK |
| 285 | 16855 | GAGGTGCAGCTGGTGCAGAGCGGAGCAGAGGTGAAGAAGCCAGGCGA |
| | | GTCCCTGAGGATCTCTTGCAAGGGCAGCGGCTACAGCTTCTCCACCTAT |
| | | TGGATCTCCTGGGTGCGCCAGATGCCTGGCAAGGGACTGGAGTGGATG |
| | | GGCAAGATCTACCCCGGCGACAGCTACACAAACTATTCTCCTAGCTTTC |
| | | AGGGCCAGGTGACCATCTCCGCCGATAAGTCCATCTCTACAGCCTATCT |
| | | GCAGTGGAGCTCCCTGAAGGCCAGCGACACCGCCATGTACTATTGCGCC |
| | | AGAGGCTACGGCATCTTCGATTATTGGGGCCAGGGCACCCTGGTGACAG |
| | | TGTCTAGCGCTAGCACAAAGGGCCCAAGCGTGTTTCCTCTGGCCCCATC |
| | | CTCTAAGAGCACCTCCGGAGGAACAGCCGCCCTGGGCTGTCTGGTGAA |
| | | GGACTACTTCCCTGAGCCAGTGACCGTGTCCTGGAACTCTGGGGCCCTG |
| | | ACCAGCGGAGTGCACACATTTCCCGCCGTGCTGCAGAGCTCCGGACTGT |
| | | ACTCCCTGTCTAGCGTGGTGACCGTGCCTTCCTCTAGCCTGGGCACCCA |
| | | GACATATATCTGCAACGTGAATCACAAGCCTTCTAATACAAAGGTCGAC |
| | | AAGAAGGTGGAGCCAAAGAGCTGTGATAAGACCCACACATGCCCACCT |
| | | TGTCCGGCGCCAGAGGCCGCCGGAGGACCAAGCGTGTTCCTGTTTCCAC |
| | | CCAAGCCCAAGGACACCCTGATGATCTCCAGGACCCCTGAGGTGACAT |
| | | GCGTGGTGGTGTCTGTGAGCCACGAGGACCCAGAGGTGAAGTTCAACT |
| | | GGTACGTGGATGGCGTGGAGGTGCACAATGCCAAGACAAAGCCCAGAG |
| | | AGGAGCAGTACAATTCCACCTATCGCGTGGTGTCTGTGCTGACAGTGCT |
| | | GCACCAGGATTGGCTGAACGGCAAGGAGTATAAGTGCAAGGTGTCCAA |
| | | TAAGGCCCTGCCAGCCCCCATCGAGAAGACCATCTCTAAGGCCAAGGG |
| | | CCAGCCTCGCGAACCTCAGGTGTACGTGTATCCTCCAAGCAGAGACGAG |
| | | CTGACCAAGAACCAGGTGTCCCTGACATGTCTGGTGAAGGGCTTTTACC |
| | | CCTCTGATATCGCCGTGGAGTGGGAGAGCAATGGCCAGCCTGAGAACA |
| | | ATTATAAGACCACACCCCCTGTGCTGGACAGCGATGGCTCCTTCGCCCT |
| | | GGTGAGCAAGCTGACCGTGGACAAGTCCAGGTGGCAGCAGGGCAACGT |
| | | GTTTTCCTGCTCTGTGATGCACGAGGCCCTGCACAATCACTACACACAG |
| | | AAGAGCCTGAGCTTAAGCCCAGGAGGAGGAGGAGGACAGGTGCAGCTG |
| | | GTGCAGAGCGGAGCCGAGGTGAAGAAGCCTGGGGCCAGCGTGAAGGTG |
| | | TCTTGCAAGGCCTCTGGCTACAGCTTCACAGGCTATACCATGAACTGGG |
| | | TGCGGCAGGCCCCCGGACAGGGACTGGAGTGGATGGGCCTGATCACAC |
| | | CTTACAACGGGGCCAGCTCCTATAATCAGAAGTTTAGGGGCAAGGCCA |
| | | CCATGACAGTGGACACCTCCACATCTACCGTGTACATGGAGCTGTCTAG |
| | | CCTGCGCTCCGAGGATACCGCCGTGTACTATTGCGCCAGAGGCGGATAC |
| | | GACGGCAGAGGCTTCGATTATTGGGGCCAGGGCACACTGGTGACCGTG |
| | | TCCTCTGGAGGAGGAGGCAGCGGCGGAGGAGGCTCCGGCGGCGGCGGC |
| | | TCTGACATCCAGATGACACAGTCTCCAAGCTCCCTGAGCGCCTCCGTGG |
| | | GCGATCGGGTGACAATCACCTGTAGCGCCTCTAGCTCCGTGTCCTACAT |
| | | GCACTGGTATCAGCAGAAGTCCGGCAAGGCCCCAAAGCTGCTGATCTAT |
| | | GACACCAGCAAGCTGGCCTCCGGAGTGCCATCTAGGTTCTCTGGCAGCG |
| | | GCTCCGGCACAGACTTTACACTGACCATCTCTAGCCTGCAGCCTGAGGA |
| | | TTTCGCCACCTACTATTGTCAGCAGTGGAGCAAGCACCCACTGACATTT |
| | | GGCCAGGGCACCAAGCTGGAGATCAAG |
| 286 | 16861 | EVQLVQSGAEVKKPGESLRISCKGSGYSFSTYWISWVRQMPGKGLEWMGK |
| | | IYPGDSYTNYSPSFQGQVTISADKSISTAYLQWSSLKASDTAMYYCARGYGI |
| | | FDYWGQGTLVTVSSASTKGPSVFPLAPSSKSTSGGTAALGCLVKDYFPEPV |
| | | TVSWNSGALTSGVHTFPAVLQSSGLYSLSSVVTVPSSSLGTQTYICNVNHKP |
| | | SNTKVDKKVEPKSCDKTHTCPPCPAPEAAGGPSVFLFPPKPKDTLMISRTPE |
| | | VTCVVVSVSHEDPEVKFNWYVDGVEVHNAKTKPREEQYNSTYRVVSVLT |
| | | VLHQDWLNGKEYKCKVSNKALPAPIEKTISKAKGQPREPQVYVYPPSRDEL |
| | | TKNQVSLTCLVKGFYPSDIAVEWESNGQPENNYKTTPPVLDSDGSFALVSK |
| | | LTVDKSRWQQGNVFSCSVMHEALHNHYTQKSLSLSPGGGGGQVQLVQSG |
| | | AEVVKPGASVKMSCKASGYTFTGYNIHWVKQAPGQGLEWIGAIYPGNGD |
| | | TSYKQKFRGRATLTADTSTSTVYMELSSLRSEDSAVYYCARGETARATFAY |
| | | WGQGTLVTVSSGGGGSGGGGSGGGGSDIQMTQSPSSLSASVGDRVTITCSA |
| | | SQDIGNFLNWYQQKPGKTVKVLIYYTSSLYSGVPSRFSGSGSGTDYTLTISS |
| | | LQPEDFATYYCQQYSKLPLTFGQGTKLELK |
| 287 | 16861 | GAGGTGCAGCTGGTGCAGAGCGGAGCAGAGGTGAAGAAGCCAGGCGA |
| | | GTCCCTGAGGATCTCTTGCAAGGGCAGCGGCTACAGCTTCTCCACCTAT |
| | | TGGATCTCCTGGGTGCGCCAGATGCCTGGCAAGGGACTGGAGTGGATG |
| | | GGCAAGATCTACCCCGGCGACAGCTACACAAACTATTCTCCTAGCTTTC |
| | | AGGGCCAGGTGACCATCTCCGCCGATAAGTCCATCTCTACAGCCTATCT |
| | | GCAGTGGAGCTCCCTGAAGGCCAGCGACACCGCCATGTACTATTGCGCC |
| | | AGAGGCTACGGCATCTTCGATTATTGGGGCCAGGGCACCCTGGTGACAG |
| | | TGTCTAGCGCTAGCACAAAGGGCCCAACCGTGTTTCCTCTGGCCCCATC |
| | | CTCTAAGAGCACCTCCGGAGGAACAGCCGCCCTGGGCTGTCTGGTGAA |
| | | GGACTACTTCCCTGAGCCAGTGACCGTGTCCTGGAACTCTGGGGCCCTG |
| | | ACCAGCGGAGTGCACACATTTCCCGCCGTGCTGCAGAGCTCCGGACTGT |
| | | ACTCCCTGTCTAGCGTGGTGACCGTGCCTTCCTCTAGCCTGGGCACCCA |
| | | GACATATATCTGCAACGTGAATCACAAGCCTTCTAATACAAAGGTCGAC |
| | | AAGAAGGTGGAGCCAAAGAGCTGTGATAAGACCCACACATGCCCACCT |
| | | TGTCCGGCGCCAGAGGCCGCCGGAGGACCAAGCGTGTTCCTGTTTCCAC |
| | | CCAAGCCCAAGGACACCCTGATGATCTCCAGGACCCCTGAGGTGACAT |
| | | GCGTGGTGGTGTCTGTGAGCCACGAGGACCCAGAGGTGAAGTTCAACT |
| | | GGTACGTGGATGGCGTGGAGGTGCACAATGCCAAGACAAAGCCCAGAG |
| | | AGGAGCAGTACAATTCCACCTATCGCGTGGTGTCTGTGCTGACAGTGCT |
| | | GCACCAGGATTGGCTGAACGGCAAGGAGTATAAGTGCAAGGTGTCCAA |
| | | TAAGGCCCTGCCAGCCCCCATCGAGAAGACCATCTCTAAGGCCAAGGG |
| | | CCAGCCTCGCGAACCTCAGGTGTACGTGTATCCTCCAAGCAGAGACGAG |
| | | CTGACCAAGAACCAGGTGTCCCTGACATGTCTGGTGAAGGGCTTTTACC |
| | | CCTCTGATATCGCCGTGGAGTGGGAGAGCAATGGCCAGCCTGAGAACA |
| | | ATTATAAGACCACACCCCCTGTGCTGGACAGCGATGGCTCCTTCGCCCT |
| | | GGTGAGCAAGCTGACCGTGGACAAGTCCAGGTGGCAGCAGGGCAACGT |
| | | GTTTTCCTGCTCTGTGATGCACGAGGCCCTGCACAATCACTACACACAG |
| | | AAGAGCCTGAGCTTAAGCCCTGGAGGAGGAGGAGGACAGGTGCAGCTG |
| | | GTGCAGTCTGGAGCCGAGGTGGTGAAGCCAGGGGCCAGCGTGAAGATG |
| | | TCCTGCAAGGCCTCTGGCTACACCTTCACAGGCTATAACATCCACTGGG |
| | | TGAAGCAGGCCCCCGGACAGGGACTGGAGTGGATCGGAGCCATCTACC |
| | | CTGGCAATGGCGACACAAGCTATAAGCAGAAGTTTCGGGGCAGAGCCA |
| | | CCCTGACAGCCGATACCTCCACATCTACCGTGTACATGGAGCTGAGCTC |
| | | CCTGCGGTCCGAGGACTCTGCCGTGTACTATTGCGCCAGGGGCGAGACA |
| | | GCAAGGGCCACCTTCGCCTATTGGGGACAGGGCACACTGGTGACCGTGT |
| | | CTAGCGGCGGCGGCGGCTCTGGAGGAGGAGGCAGCGGCGGAGGAGGCT |
| | | CCGATATCCAGATGACCCAGTCCCCATCCTCTCTGAGCGCCTCCGTGGG |
| | | CGACCGGGTGACAATCACCTGTTCTGCCAGCCAGGATATCGGCAACTTC |
| | | CTGAATTGGTACCAGCAGAAGCCCGGCAAGACAGTGAAGGTGCTGATC |
| | | TACTATACCAGCTCCCTGTACAGCGGCGTGCCTTCCAGGTTTTCCGGCTC |
| | | TGCAGCGGCACAGACTATACACTGACCATCTCTAGCCTGCAGCCAGAG |
| | | GATTTCGCCACCTACTATTGTCAGCAGTACAGCAAGCTGCCCCTGACAT |
| | | TTGGCCAGGGCACCAAGCTGGAGCTGAAG |
| 288 | 16863 | EVQLVQSGAEVKKPGESLRISCKGSGYSFSTYWISWVRQMPGKGLEWMGK |
| | | IYPGDSYTNYSPSFQGQVTISADKSISTAYLQWSSLKASDTAMYYCARGYGI |
| | | FDYWGQGTLVTVSSASTKGPSVFPLAPSSKSTSGGTAALGCLVKDYFPEPV |
| | | TVSWNSGALTSGVHTFPAVLQSSGLYSLSSVVTVPSSSLGTQTYICNVNHKP |
| | | SNTKVDKKVEPKSCDKTHTCPPCPAPEAAGGPSVFLFPPKPKDTLMISRTPE |
| | | VTCVVVSVSHEDPEVKFNWYVDGVEVHNAKTKPREEQYNSTYRVVSVLT |
| | | VLHQDWLNGKEYKCKVSNKALPAPIEKTISKAKGQPREPQVYVYPPSRDEL |
| | | TKNQVSLTCLVKGFYPSDIAVEWESNGQPENNYKTTPPVLDSDGSFALVSK |
| | | LTVDKSRWQQGNVFSCSVMHEALHNHYTQKSLSLSPGGGGGEVQLVESG |
| | | GGLVQPGGSLRLSCAASGFSFSDFAMSWVRQAPGKGLEWVATIGRVAFHT |
| | | YYPDSMKGRFTISRDNSKNTLYLQMNSLRAEDTAVYYCARHRGFDVGHFD |
| | | FWGQGTLVTVSSGGGGSGGGGSGGGGSDIQMTQSPSSLSASVGDRVTITCR |
| | | SSETLVHSSGNTYLEWYQQKPGKAPKLLIYRVSNRFSGVPSRFSGSGSGTDF |
| | | TLTISSLQPEDFATYYCFQGSFNPLTFGQGTKVEIK |
| 289 | 16863 | GAGGTGCAGCTGGTGCAGAGCGGAGCAGAGGTGAAGAAGCCAGGCGA |
| | | GTCCCTGAGGATCTCTTGCAAGGGCAGCGGCTACAGCTTCTCCACCTAT |
| | | TGGATCTCCTGGGTGCGCCAGATGCCTGGCAAGGGACTGGAGTGGATG |
| | | GGCAAGATCTACCCCGGCGACAGCTACACAAACTATTCTCCTAGCTTTC |
| | | AGGGCCAGGTGACCATCTCCGCCGATAAGTCCATCTCTACAGCCTATCT |
| | | GCAGTGGAGCTCCCTGAAGGCCAGCGACACCGCCATGTACTATTGCGCC |
| | | AGAGGCTACGGCATCTTCGATTATTGGGGCCAGGGCACCCTGGTGACAG |
| | | TGTCTAGCGCTAGCACAAAGGGCCCAAGCGTGTTTCCTCTGGCCCCATC |
| | | CTCTAAGAGCACCTCCGGAGGAACAGCCGCCCTGGGCTGTCTGGTGAA |
| | | GGACTACTTCCCTGAGCCAGTGACCGTGTCCTGGAACTCTGGGGCCCTG |
| | | ACCAGCGGAGTGCACACATTTCCCGCCGTGCTGCAGAGCTCCGGACTGT |
| | | ACTCCCTGTCTAGCGTGGTGACCGTGCCTTCCTCTAGCCTGGGCACCCA |
| | | GACATATATCTGCAACGTGAATCACAAGCCTTCTAATACAAAGGTCGAC |
| | | AAGAAGGTGGAGCCAAAGAGCTGTGATAAGACCCACACATGCCCACCT |
| | | TGTCCGGCGCCAGAGGCCGCCGGAGGACCAAGCGTGTTCCTGTTTCCAC |
| | | CCAAGCCCAAGGACACCCTGATGATCTCCAGGACCCCTGAGGTGACAT |
| | | GCGTGGTGGTGTCTGTGAGCCACGAGGACCCAGAGGTGAAGTTCAACT |
| | | GGTACGTGGATGGCGTGGAGGTGCACAATGCCAAGACAAAGCCCAGAG |
| | | AGGAGCAGTACAATTCCACCTATCGCGTGGTGTCTGTGCTGACAGTGCT |
| | | GCACCAGGATTGGCTGAACGGCAAGGAGTATAAGTGCAAGGTGTCCAA |
| | | TAAGGCCCTGCCAGCCCCCATCGAGAAGACCATCTCTAAGGCCAAGGG |
| | | CCAGCCTCGCGAACCTCAGGTGTACGTGTATCCTCCAAGCAGAGACGAG |
| | | CTGACCAAGAACCAGGTGTCCCTGACATGTCTGGTGAAGGGCTTTTACC |
| | | CCTCTGATATCGCCGTGGAGTGGGAGAGCAATGGCCAGCCTGAGAACA |
| | | ATTATAAGACCACACCCCCTGTGCTGGACAGCGATGGCTCCTTCGCCCT |
| | | GGTGAGCAAGCTGACCGTGGACAAGTCCAGGTGGCAGCAGGGCAACGT |
| | | GTTTTCCTGCTCTGTGATGCACGAGGCCCTGCACAATCACTACACACAG |
| | | AAGAGCCTGAGCTTAAGCCCTGGAGGAGGAGGAGGAGAGGTGCAGCTG |
| | | GTGGAGAGCGGCGGCGGCCTGGTGCAGCCAGGAGGCTCTCTGAGGCTG |
| | | AGCTGCGCAGCCTCCGGCTTCTCCTTTTCTGACTTCGCCATGTCCTGGGT |
| | | GCGGCAGGCCCCCGGCAAGGGACTGGAGTGGGTGGCCACCATCGGCAG |
| | | AGTGGCCTTCCACACATACTATCCTGACTCCATGAAGGGCCGGTTTACC |
| | | ATCTCTAGAGATAACAGCAAGAATACACTGTACCTGCAGATGAACTCCC |
| | | TGCGCGCCGAGGATACCGCCGTGTACTATTGCGCAAGGCACAGAGGCTT |
| | | TGACGTGGGACACTTCGATTTTTGGGGCCAGGGCACCCTGGTGACAGTG |
| | | AGCAGCGGAGGAGGAGGCTCCGGCGGCGGAGGCTCTGGAGGAGGAGG |
| | | CAGCGACATCCAGATGACCCAGAGCCCATCTAGCCTGAGCGCCTCCGTG |
| | | GGCGATAGGGTGACCATCACATGTCGCTCCTCTGAGACCCTGGTGCACA |
| | | GCTCCGGCAACACATACCTGGAGTGGTATCAGCAGAAGCCCGGCAAGG |
| | | CCCCTAAGCTGCTGATCTATAGGGTGTCCAATCGCTTCTCTGGAGTGCC |
| | | AAGCCGGTTTTCTGGCAGCGGCTCCGGAACCGACTTCACCCTGACAATC |
| | | TCTAGCCTGCAGCCAGAGGATTTTGCCACATACTATTGTTTCCAGGGCT |
| | | CCTTTAATCCCCTGACCTTCGGCCAGGGCACAAAGGTGGAGATCAAG |
| 290 | 18512 | QVQLQESGPGLVQPTQSLSITCTVSGFSLISYGVHWVRQSPGKGLEWLGVI |
| | | WSGGSTDYNAAFISRLSISKDNSKSQVFFKMNSLQADDTAIYYCARNPLTA |
| | | TVMDYWGQGTSVTVSSASTKGPSVFPLAPSSKSTSGGTAALGCLVKDYFPE |
| | | PVTVSWNSGALTSGVHTFPAVLQSSGLYSLSSVVTVPSSSLGTQTYICNVNH |
| | | KPSNTKVDKKVEPKSCDKTHTCPPCPAPEAAGGPSVFLFPPKPKDTLMISRT |
| | | PEVTCVVVSVSHEDPEVKFNWYVDGVEVHNAKTKPREEQYNSTYRVVSV |
| | | LTVLHQDWLNGKEYKCKVSNKALPAPIEKTISKAKGQPREPQVYVYPPSRD |
| | | ELTKNQVSLTCLVKGFYPSDIAVEWESNGQPENNYKTTPPVLDSDGSFALV |
| | | SKLTVDKSRWQQGNVFSCSVMHEALHNHYTQKSLSLSPGGGGGQEQLVES |
| | | GGGLVQPEGSLTLTCTASKFSFSSLYYMCWVRQAPGKGLEWIACVYGGSS |
| | | GNTYYASWAKGRFTISKASSTTVTLQLTSLTAADTATYFCARFDVDGSGFN |
| | | LWGPGTLVTVSSGGGGSGGGGSGGGGSDIVMTQTPSSVSAAVGGTVTIKC |
| | | QASQTIGSSLAWYQQKPGQPPKLLIYRASTLASGVSSRFRGSGSGTEYTLTIS |
| | | DLECADAATYYCQWTDYGYIYIWAFGGGTEVVVK |
| 291 | 18512 | CAGGTGCAGCTGCAGGAGAGCGGACCAGGACTGGTGCAGCCTACACAG |
| | | TCTCTGAGCATCACCTGCACAGTGTCTGGCTTCACCCTGATCTCCTACGG |
| | | AGTGCACTGGGTGAGGCAGTCCCCTGGCAAGGGACTGGAGTGGCTGGG |
| | | CGTGATCTGGTCTGGCGGCACCACCGACTATAACGCCGCCTTTATCTCC |
| | | CGCCTGTCCATCTCTAAGGATAACAGCAAGTCCCAGGTGTTCTTTAAGA |
| | | TGAACAGCCTGCAGGCCGACGATACAGCCATCTACTATTGTGCCCGGAA |
| | | TCCCCTGACCGCCACAGTGATGGACTACTGGGGCCAGGGCACCTCTGTG |
| | | ACAGTGAGCTCCGCTAGCACAAAGGGCCCCTCCGTGTTTCCTCTGGCCC |
| | | CATCCTCTAAGTCCACCTCTGGAGGAACAGCCGCCCTGGGCTGTCTGGT |
| | | GAAGGATTACTTCCCTGAGCCAGTGACCGTGTCCTGGAACTCTGGGGCC |
| | | CTGACCAGCGGAGTGCACACATTTCCCGCCGTGCTGCAGAGCTCCGGAC |
| | | TGTACTCCCTGTCTAGCGTGGTGACCGTGCCTTCCTCTAGCCTGGGCACC |
| | | CAGACATATATCTGCAACGTGAATCACAAGCCTTCCAATACAAAGGTCG |
| | | ACAAGAAGGTGGAGCCAAAGTCTTGTGATAAGACCCACACATGCCCAC |
| | | CTTGTCCGGCGCCAGAGGCCGCCGGAGGACCAAGCGTGTTCCTGTTTCC |
| | | ACCCAAGCCCAAGGACACCCTGATGATCTCCCGGACCCCAGAGGTGAC |
| | | ATGCGTGGTGGTGAGCGTGTCCCACGAGGACCCCGAGGTGAAGTTTAA |
| | | CTGGTACGTGGATGGCGTGGAGGTGCACAATGCCAAGACAAAGCCCCG |
| | | GGAGGAGCAGTACAATTCTACCTATAGAGTGGTGAGCGTGCTGACAGT |
| | | GCTGCACCAGGATTGGCTGAACGGCAAGGAGTATAAGTGTAAGGTGAG |
| | | CAATAAGGCCCTGCCAGCCCCCATCGAGAAGACCATCTCCAAGGCCAA |
| | | GGGCCAGCCTCGCGAGCCCCAGGTGTACGTGTATCCCCCTAGCAGAGAC |
| | | GAGCTGACAAAGAACCAGGTGTCCCTGACCTGCCTGGTGAAGGGCTTCT |
| | | ATCCCTCTGATATCGCCGTGGAGTGGGAGAGCAATGGCCAGCCTGAGA |
| | | ACAATTACAAGACCACACCACCCGTGCTGGACAGCGATGGCTCCTTCGC |
| | | CCTGGTGAGCAAGCTGACAGTGGACAAGTCCAGGTGGCAGCAGGGCAA |
| | | CGTGTTTTCTTGTAGCGTGATGCACGAGGCCCTGCACAATCACTATACC |
| | | CAGAAGTCCCTGTCTCTGAGCCCAGGAGGAGGAGGAGGACAGGAGCAG |
| | | CTGGTGGAGTCTGGCGGCGGCCTGCAGCAGCCAGAGGGCTCCCTGACCC |
| | | TGACATGCACCGCCTCTAAGTTCAGCTTTAGCTCCCTGTACTATATGTGC |
| | | TGGGTGAGGCAGGCCCCCGGCAAGGGACTGGAGTGGATCGCCTGCGTG |
| | | TATGGCGGCTCTAGCGGCAACACCTACTATGCCTCCTGGGCCAAGGGCC |
| | | GCTTCACAATCTCTAAGGCCTCCTCTACCACAGTGACCCTGCAGCTGAC |
| | | AAGCCTGACCGCCGCCGACACAGCCACCTACTTCTGTGCCCGGTTTGAC |
| | | GTGGATGGCTCCGGCTTTAATCTGTGGGGCCCTGGCACACTGGTGACCG |
| | | TGAGCTCCGGAGGAGGAGGCACCGGAGGAGGAGGCTCCGGCGGCGGC |
| | | GGCTCTGATATCGTGATGACACAGACCCCATCTAGCGTGAGCGCCGCCG |
| | | TGGGAGGCACAGTGACCATCAAGTGCCAGGCCTCCCAGACCATCGGCT |
| | | CCTCTCTGGCCTGGTATCAGCAGAAGCCTGGCCAGCCTCCAAAGCTGCT |
| | | GATCTACAGAGCCTCCACACTGGCCTCTGGCGTGAGCTCCCGGTTCAGA |
| | | GGCTCCGGCTCTGGAACCGAGTACACACTGACCATCAGCGACCTGGAGT |
| | | GCGCAGATGCAGCAACATACTATTGTCAGTGGACCGATTACGCCTATAT |
| | | CTACATCTGGGCCTTTGGCGGAGGAACCGAGGTGGTGGTGAAG |
| 292 | 16866 | EVQLVQSGAEVKKPGESLRISCKGSGYSFSTYWISWVRQMPGKGLEWMGK |
| | | IYPGDSYTNYSPSFQGQVTISADKSISTAYLQWSSLKASDTAMYYCARGYGI |
| | | FDYWGQGTLVTVSSASTKGPSVFPLAPSSKSTSGGTAALGCLVKDYFPEPV |
| | | TVSWNSGALTSGVHTFPAVLQSSGLYSLSSVVTVPSSSLGTQTYICNVNHKP |
| | | SNTKVDKKVEPKSCDKTHTCPPCPAPEAAGGPSVFLFPPKPKDTLMISRTPE |
| | | VTCVVVSVSHEDPEVKFNWYVDGVEVHNAKTKPREEQYNSTYRVVSVLT |
| | | VLHQDWLNGKEYKCKVSNKALPAPIEKTISKAKGQPREPQVYVYPPSRDEL |
| | | TKNQVSLTCLVKGFYPSDIAVEWESNGQPENNYKTTPPVLDSDGSFALVSK |
| | | LTVDKSRWQQGNVFSCSVMHEALHNHYTQKSLSLSPGGGGGQVELVQSG |
| | | AEVKKPGESLKISCKGSGYSFTSYWIGWVRQAPGKGLEWMGIIDPGDSRTR |
| | | YSPSFQGQVTISADKSISTAYLQWSSLKASDTAMYYCARGQLYGGTYMDG |
| | | WGQGTLVTVSSVEGGSGGSGGSGGSGGVDDIALTQPASVSGSPGQSITISCT |
| | | GTSSDIGGYNSVSWYQQHPGKAPKLMIYGVNNRPSGVSNRFSGSKSGNTA |
| | | SLTISGLQAEDEADYYCSSYDIESATPVFGGGTKLTVL |
| 293 | 16866 | GAGGTGCAGCTGGTGCAGAGCGGAGCAGAGGTGAAGAAGCCAGGCGA |
| | | GTCCCTGAGGATCTCTTGCAAGGGCAGCGGCTACAGCTTCTCCACCTAT |
| | | TGGATCTCCTGGGTGCGCCAGATGCCTGGCAAGGGACTGGAGTGGATG |
| | | GGCAAGATCTACCCCGGCGACAGCTACACAAACTATTCTCCTAGCTTTC |
| | | AGGGCCAGGTGACCATCTCCGCCGATAAGTCCATCTCTACAGCCTATCT |
| | | GCAGTGGAGCTCCCTGAAGGCCAGCGACACCGCCATGTACTATTGCGCC |
| | | AGAGGCTACGGCATCTTCGATTATTGGGGCCAGGGCACCCTGGTGACAG |
| | | TGTCTAGCGCTAGCACAAAGGGCCCAAGCGTGTTTCCTCTGGCCCCATC |
| | | CTCTAAGAGCACCTCCGGAGGAACAGCCGCCCTGGGCTGTCTGGTGAA |
| | | GGACTACTTCCCTGAGCCAGTGACCGTGTCCTGGAACTCTGGGGCCCTG |
| | | ACCAGCGGAGTGCACACATTTCCCGCCGTGCTGCAGAGCTCCGGACTGT |
| | | ACTCCCTGTCTAGCGTGGTGACCGTGCCTTCCTCTAGCCTGGGCACCCA |
| | | GACATATATCTGCAACGTGAATCACAAGCCTTCTAATACAAAGGTCGAC |
| | | AAGAAGGTGGAGCCAAAGAGCTGTGATAAGACCCACACATGCCCACCT |
| | | TGTCCGGCGCCAGAGGCCGCCGGAGGACCAAGCGTGTTCCTGTTTCCAC |
| | | CCAAGCCCAAGGACACCCTGATGATCTCCAGGACCCCTGAGGTGACAT |
| | | GCGTGGTGGTGTCTGTGAGCCACGAGGACCCAGAGGTGAAGTTCAACT |
| | | GGTACGTGGATGGCGTGGAGGTGCACAATGCCAAGACAAAGCCCAGAG |
| | | AGGAGCAGTACAATTCCACCTATCGCGTGGTGTCTGTGCTGACAGTGCT |
| | | GCACCAGGATTGGCTGAACGGCAAGGAGTATAAGTGCAAGGTGTCCAA |
| | | TAAGGCCCTGCCAGCCCCCATCGAGAAGACCATCTCTAAGGCCAAGGG |
| | | CCAGCCTCGCGAACCTCAGGTGTACGTGTATCCTCCAAGCAGAGACGAG |
| | | CTGACCAAGAACCAGGTGTCCCTGACATGTCTGGTGAAGGGCTTTTACC |
| | | CCTCTGATATCGCCGTGGAGTGGGAGAGCAATGGCCAGCCTGAGAACA |
| | | ATTATAAGACCACACCCCCTGTGCTGGACAGCGATGGCTCCTTCGCCCT |
| | | GGTGAGCAAGCTGACCGTGGACAAGTCCAGGTGGCAGCAGGGCAACGT |
| | | GTTTTCCTGCTCTGTGATGCACGAGGCCCTGCACAATCACTACACACAG |
| | | AAGAGCCTGAGCTTAAGCCCAGGAGGAGGAGGAGGACAGGTGGAGCT |
| | | GGTGCAGTCCGGAGCCGAGGTGAAGAAGCCTGGCGAGTCTCTGAAGAT |
| | | CAGCTGCAAGGGCTCTGGCTACAGCTTCACCTCCTATTGGATCGGATGG |
| | | GTGCGGCAGGCCCCTGGCAAGGGACTGGAGTGGATGGGCATCATCGAC |
| | | CCTGGCGATTCTCGGACAAGATACTCTCCAAGCTTTCAGGGCCAGGTGA |
| | | CCATCAGCGCCGACAAGTCCATCTCTACAGCCTATCTGCAGTGGAGCTC |
| | | CCTGAAGGCCAGCGATACCGCCATGTACTATTGCGCCAGGGGCCAGCTG |
| | | TACGGAGGAACATATATGGACGGATGGGGACAGGGCACCCTGGTGACA |
| | | GTGTCTAGCGTGGAGGGAGGCTCTGGAGGCAGCGGAGGCTCCGGAGGC |
| | | TCTGGAGGAGTGGACGATATCGCCCTGACCCAGCCAGCCAGCGTGTCCG |
| | | GCTCTCCAGGCCAGTCCATCACAATCTCTTGTACCGGCACATCCTCTGAT |
| | | ATCGGCGGCTACAACAGCGTGTCCTGGTATCAGCAGCACCCCGGCAAG |
| | | GCCCCTAAGCTGATGATCTACGGCGTGAACAATAGGCCAAGCGGCGTG |
| | | TCCAACCGCTTCTCTGGCAGCAAGTCCGGCAATACCGCCAGCCTGACAA |
| | | TCTCCGGACTGCAGGCAGAGGACGAGGCAGATTACTATTGTAGCTCCTA |
| | | TGACATCGAGTCCGCCACCCCCGTGTTTGGAGGAGGCACCAAGCTGACA |
| | | GTGCTG |
| 294 | 16870 | EVQLVQSGAEVKKPGESLRISCKGSGYSFSTYWISWVRQMPGKGLEWMGK |
| | | IYPGDSYTNYSPSFQGQVTISADKSISTAYLQWSSLKASDTAMYYCARGYGI |
| | | FDYWGQGTLVTVSSASTKGPSVFPLAPSSKSTSGGTAALGCLVKDYFPEPV |
| | | TVSWNSGALTSGVHTFPAVLQSSGLYSLSSVVTVPSSSLGTQTYICNVNHKP |
| | | SNTKVDKKVEPKSCDKTHTCPPCPAPEAAGGPSVFLFPPKPKDTLMISRTPE |
| | | VTCVVVSVSHEDPEVKFNWYVDGVEVHNAKTKPREEQYNSTYRVVSVLT |
| | | VLHQDWLNGKEYKCKVSNKALPAPIEKTISKAKGQPREPQVYVLPPSRDEL |
| | | TKNQVSLLCLVKGFYPSDIAVEWESNGQPENNYLTWPPVLDSDGSFFLYSK |
| | | LTVDKSRWQQGNVFSCSVMHEALHNHYTQKSLSLSPGGGGGQVELVQSG |
| | | AEVKKPGESLKISCKGSGYSFTSYWIGWVRQAPGKGLEWMGIIDPGDSRTR |
| | | YSPSFQGQVTISADKSISTAYLQWSSLKASDTAMYYCARGQLYGGTYMDG |
| | | WGQGTLVTVSSVEGGSGGSGGSGGSGGVDDIALTQPASVSGSPGQSITISCT |
| | | GTSSDIGGYNSVSWYQQHPGKAPKLMIYGVNNRPSGVSNRFSGSKSGNTA |
| | | SLTISGLQAEDEADYYCSSYDIESATPVFGGGTKLTVL |
| 295 | 16870 | GAGGTGCAGCTGGTGCAGAGCGGAGCAGAGGTGAAGAAGCCAGGCGA |
| | | GTCCCTGAGGATCTCTTGCAAGGGCAGCGGCTACAGCTTCTCCACCTAT |
| | | TGGATCTCCTGGGTGCGCCAGATGCCTGGCAAGGGACTGGAGTGGATG |
| | | GGCAAGATCTACCCCGGCGACAGCTACACAAACTATTCTCCTAGCTTTC |
| | | AGGGCCAGGTGACCATCTCCGCCGATAAGTCCATCTCTACAGCCTATCT |
| | | GCAGTGGAGCTCCCTGAAGGCCAGCGACACCGCCATGTACTATTGCGCC |
| | | AGAGGCTACGGCATCTTCGATTATTGGGGCCAGGGCACCCTGGTGACAG |
| | | TGTCTAGCGCTAGCACAAAGGGCCCAAGCGTGTTTCCTCTGGCCCCATC |
| | | CTCTAAGAGCACCTCCGGAGGAACAGCCGCCCTGGGCTGTCTGGTGAA |
| | | GGACTACTTCCCTGAGCCAGTGACCGTGTCCTGGAACTCTGGGGCCCTG |
| | | ACCAGCGGAGTGCACACATTTCCCGCCGTGCTGCAGAGCTCCGGACTGT |
| | | ACTCCCTGTCTAGCGTGGTGACCGTGCCTTCCTCTAGCCTGGGCACCCA |
| | | GACATATATCTGCAACGTGAATCACAAGCCTTCTAATACAAAGGTCGAC |
| | | AAGAAGGTGGAGCCAAAGAGCTGTGATAAGACCCACACATGCCCACCT |
| | | TGTCCGGCGCCAGAGGCCGCCGGAGGACCAAGCGTGTTCCTGTTTCCAC |
| | | CCAAGCCCAAGGACACCCTGATGATCTCCAGGACCCCTGAGGTGACAT |
| | | GCGTGGTGGTGTCTGTGAGCCACGAGGACCCAGAGGTGAAGTTCAACT |
| | | GGTACGTGGATGGCGTGGAGGTGCACAATGCCAAGACAAAGCCCAGAG |
| | | AGGAGCAGTACAATTCCACCTATCGCGTGGTGTCTGTGCTGACAGTGCT |
| | | GCACCAGGATTGGCTGAACGGCAAGGAGTATAAGTGCAAGGTGTCCAA |
| | | TAAGGCCCTGCCAGCCCCCATCGAGAAGACCATCTCTAAGGCCAAGGG |
| | | CCAGCCTCGCGAACCTCAGGTGTACGTGCTGCCCCCTTCCAGGGACGAG |
| | | CTGACCAAGAACCAGGTGTCTCTGCTGTGCCTGGTGAAGGGCTTCTATC |
| | | CTTCTGATATCGCCGTGGAGTGGGAGAGCAATGGCCAGCCAGAGAACA |
| | | ATTACCTGACCTGGCCACCCGTGCTGGACTCCGATGGCTCTTTCTTTCTG |
| | | TATAGCAAGCTGACAGTGGACAAGTCCAGATGGCAGCAGGGCAACGTG |
| | | TTTTCTTGCAGCGTGATGCACGAGGCCCTGCACAATCACTACACACAGA |
| | | AGTCCCTGAGCTTAAGCCCAGGAGGAGGAGGAGGACAGGTGGAGCTGG |
| | | TGCAGAGCGGAGCCGAGGTGAAGAAGCCTGGCGAGAGCCTGAAGATCT |
| | | CCTGTAAGGGCAGCGGCTACTCCTTCACCTCTTATTGGATCGGATGGGT |
| | | GCGGCAGGCCCCCGGCAAGGGCCTGGAGTGGATGGGCATCATCGACCC |
| | | AGGCGATAGCCGGACAAGATACTCCCCCTCTTTTCAGGGCCAGGTGACC |
| | | ATCTCCGCCGACAAGAGCATCTCCACAGCCTATCTGCAGTGGAGCTCCC |
| | | TGAAGGCCTCCGATACCGCCATGTACTATTGCGCCAGAGGCCAGCTGTA |
| | | CGGCGGCACATATATGGACGGATGGGGACAGGGCACCCTGGTGACAGT |
| | | GTCTAGCGTGGAGGGAGGCAGCGGAGGCTCCGGAGGCTCTGGAGGCAG |
| | | CGGAGGAGTGGACGATATCGCCCTGACCCAGCCCGCCTCTGTGAGCGG |
| | | CTCCCCTGGCCAGTCTATCACAATCAGCTGTACCGGCACATCCTCTGAT |
| | | ATCGGCGGCTACAACTCTGTGAGCTGGTATCAGCAGCACCCTGGCAAGG |
| | | CCCCAAAGCTGATGATCTACGGCGTGAACAATAGGCCATCCGGCGTGTC |
| | | TAACCGCTTCTCCGGCTCTAAGAGCGGCAATACCGCCTCCCTGACAATC |
| | | TCTGGACTGCAGGCAGAGGACGAGGCAGATTACTATTGTAGCTCCTATG |
| | | ATATCGAGAGCGCCACCCCCGTGTTTGGAGGAGGCACCAAGCTGACAG |
| | | TGCTG |
| 296 | 11761 | QVQLVQSGAEVVKPGASVKISCKASGYTFTGYFMNWVKQSPGQSLEWIGR |
| | | IHPYDGDTFYNQKFQGKATLTVDKSSNTAHMELLSLTSEDFAVYYCTRYD |
| | | GSRAMDYWGQGTTVTVSSGGGGSGGGGSGGGGSDIVLTQSPLSLAVSLGQ |
| | | PAIISCKASQSVSFAGTSLMHWYHQKPGQQPRLLIYRASNLEAGVPDRFSGS |
| | | GSKTDFTLTISPVEAEDAATYYCQQSREYPYTFGGGTKLEIKAAEPKSSDKT |
| | | HTCPPCPAPELLGGPSVFLEPPKPKDTLMISRTPEVTCVVVDVSHEDPEVKF |
| | | NWYVDGVEVHNAKTKPREEQYNSTYRVVSVLTVLHQDWLNGKEYKCKV |
| | | SNKALPAPIEKTISKAKGQPREPQVYVLPPSRDELTKNQVSLLCLVKGFYPS |
| | | DIAVEWESNGQPENNYLTWPPVLDSDGSFFLYSKLTVDKSRWQQGNVFSC |
| | | SVMHEALHNHYTQKSLSLSPG |
| 297 | 11761 | CAGGTGCAGCTGGTGCAGAGCGGAGCCGAGGTGGTGAAGCCAGGGGCC |
| | | AGCGTGAAGATCAGCTGCAAGGCCTCCGGCTACACCTTCACAGGCTACT |
| | | TCATGAACTGGGTGAAGCAGTCTCCTGGCCAGAGCCTGGAGTGGATCG |
| | | GCAGAATCCACCCATACGACGGCGATACCTTCTATAACCAGAAGTTTCA |
| | | GGGCAAGGCCACCCTGACAGTGGACAAGAGCTCCAATACCGCCCACAT |
| | | GGAGCTGCTGTCCCTGACATCTGAGGATTTCGCCGTGTACTATTGCACC |
| | | CGGTACGACGGCTCCAGAGCCATGGATTATTGGGGCCAGGGCACCACA |
| | | GTGACAGTGTCTAGCGGAGGAGGAGGCTCCGGAGGAGGAGGCTCTGGC |
| | | GGCGGCGGCAGCGACATCGTGCTGACCCAGAGCCCACTGTCCCTGGCC |
| | | GTGTCCCTGGGCCAGCCCGCCATCATCTCTTGTAAGGCCTCCCAGAGCG |
| | | TGAGCTTCGCCGGGACCAGCCTGATGCACTGGTACCACCAGAAGCCCG |
| | | GCCAGCAGCCCAGACTGCTGATCTATAGGGCCTCCAATCTGGAGGCCGG |
| | | AGTGCCAGACCGGTTCTCCGGCTCTGGCAGCAAGACCGACTTCACCCTG |
| | | ACAATCAGCCCTGTGGAGGCAGAGGATGCAGCAACATACTATTGTCAG |
| | | CAGTCCAGGGAGTACCCATATACCTTTGGCGGCGGCACAAAGCTGGAG |
| | | ATCAAGGCGGCCGAGCCTAAAAGTAGCGATAAAACCCATACCTGCCCC |
| | | CCCTGCCCGGCGCCAGAACTGCTGGGAGGACCAAGCGTGTTCCTGTTTC |
| | | CACCCAAGCCTAAAGACACCCTGATGATTTCCCGGACTCCTGAGGTCAC |
| | | CTGCGTGGTCGTGGACGTGTCTCACGAGGACCCCGAAGTCAAGTTCAAC |
| | | TGGTACGTGGATGGCGTCGAAGTGCATAATGCCAAGACCAAACCCCGG |
| | | GAGGAACAGTACAACTCTACCTATAGAGTCGTGAGTGTCCTGACAGTGC |
| | | TGCACCAGGACTGGCTGAATGGGAAGGAGTATAAGTGTAAAGTGAGCA |
| | | ACAAAGCCCTGCCCGCCCcAATcGAAAAAACAATCTCTAAAGCAAAAG |
| | | GACAGCCTCGCGAACCACAGGTCTACGTGCTGCCCCCTAGCCGCGACGA |
| | | ACTGACTAAAAATCAGGTCTCTCTGCTGTGTCTGGTCAAAGGATTCTAC |
| | | CCTTCCGACATCGCCGTGGAGTGGGAAAGTAACGGCCAGCCCGAGAAC |
| | | AATTACCTGACCTGGCCCCCTGTGCTGGACTCTGATGGGAGTTTCTTTCT |
| | | GTATTCAAAGCTGACAGTCGATAAAAGCCGGTGGCAGCAGGGCAATGT |
| | | GTTCAGCTGCTCCGTCATGCACGAAGCACTGCACAACCATTACACTCAG |
| | | AAGTCCCTGTCCCTGTCACCTGGC |

TABLE Y1
Sequences

| SEQ | Description | |
|---|---|---|
| ID | or clone | |
| NO: | number | Sequence |
| 344 | 12153 | EPKSSDKTHTCPPCPAPEAAGGPSVFLFPPKPKDTLMISRTPEVTCVVVSVS |
| | | HEDPEVKFNWYVDGVEVHNAKTKPREEQYNSTYRVVSVLTVLHQDWLN |
| | | GKEYKCKVSNKALPAPIEKTISKAKGQPREPQVYVLPPSRDELTKNQVSLL |
| | | CLVKGFYPSDIAVEWESNGQPENNYLTWPPVLDSDGSFFLYSKLTVDKSR |
| | | WQQGNVFSCSVMHEALHNHYTQKSLSLSPG |
| 345 | 20891 | DIQMTQSPSSLSASVGDRVTITCSASQGISNYLNWYQQKPGKAPKLLIYYTS |
| | | SLHSGVPSRFSGSGSGTDFTFTISSLQPEDIATYYCQQYSKFPWTFGQGTKV |
| | | EIKRTVAAPSVFIFPPSDEQLKSGTASVVCLLNNFYPREAKVQWKVDNALQ |
| | | SGNSQESVTEQDSKDSTYSLSSTLTLSKADYEKHKVYACEVTHQGLSSPVT |
| | | KSFNRGEC |
| 346 | 20898 | EIVLTQSPATLSLSPGERATLSCKASENVGSYVSWYQQKPGQAPRLLIYGAS |
| | | NRYTGVPARFSGSGSGTDFTLTISSLEPEDFAVYYCGQSYSYPLTFGGGTKV |
| | | EIKRTVAAPSVFIFPPSDEQLKSGTASVVCLLNNFYPREAKVQWKVDNALQ |
| | | SGNSQESVTEQDSKDSTYSLSSTLTLSKADYEKHKVYACEVTHQGLSSPVT |
| | | KSFNRGEC |
| 347 | 21663 | EVQLVESGGGLVQPGGSLRLSCAASGFTISNNYYMCWVRQAPGKGLEWIA |
| | | CIYGGISGRTYYADSAKGRFTISKDSSNTVYLQMNSLRAEDTAVYYCVRGY |
| | | VGTSNLWGQGTLVTVSSASTKGPSVFPLAPSSKSTSGGTAALGCLVKDYFP |
| | | EPVTVSWNSGALTSGVHTFPAVLQSSGLYSLSSVVTVPSSSLGTQTYICNVN |
| | | HKPSNTKVDKKVEPKSCDKTHT |
| 348 | 21708 | EVQLVESGGGLIQPGGSLRISCAVSGFSLTTYAISWVRQAPGKGLEWLGIIW |
| | | PGGGTNYADSLKGRLTISKDNSKNTVYLQMNSLRTEDTAVYYCARGAGT |
| | | WYFDVWGQGTLVTVSSASTKGPSVFPLAPSSKSTSGGTAALGCLVKDYFPE |
| | | PVTVSWNSGALTSGVHTFPAVLQSSGLYSLSSVVTVPSSSLGTQTYICNVNH |
| | | KPSNTKVDKKVEPKSCDKTHTCPPCPAPEAAGGPSVFLFPPKPKDTLMISRT |
| | | PEVTCVVVSVSHEDPEVKFNWYVDGVEVHNAKTKPREEQYNSTYRVVSV |
| | | LTVLHQDWLNGKEYKCKVSNKALPAPIEKTISKAKGQPREPQVYVLPPSRD |
| | | ELTKNQVSLLCLVKGFYPSDIAVEWESNGQPENNYLTWPPVLDSDGSFFLY |
| | | SKLTVDKSRWQQGNVFSCSVMHEALHNHYTQKSLSLSPG |
| 349 | 21709 | EVQLVESGGGLVQPGGSLRLSCAASGFTFSEFGMHWVRQAPGKGLEWVSY |
| | | ISSGGSTIYYADSVKGRFTISRDNAKNSLYLQMNSLRAEDTAVYYCARDW |
| | | VDYWGQGTLVTVSSASTKGPSVFPLAPSSKSTSGGTAALGCLVKDYFPEPV |
| | | TVSWNSGALTSGVHTFPAVLQSSGLYSLSSVVTVPSSSLGTQTYICNVNHKP |
| | | SNTKVDKKVEPKSCDKTHTCPPCPAPEAAGGPSVFLFPPKPKDTLMISRTPE |
| | | VTCVVVSVSHEDPEVKFNWYVDGVEVHNAKTKPREEQYNSTYRVVSVLT |
| | | VLHQDWLNGKEYKCKVSNKALPAPIEKTISKAKGQPREPQVYVLPPSRDEL |
| | | TKNQVSLLCLVKGFYPSDIAVEWESNGQPENNYLTWPPVLDSDGSFFLYSK |
| | | LTVDKSRWQQGNVFSCSVMHEALHNHYTQKSLSLSPG |
| 350 | 21828 | DIVMTQTPASVEAAVGGTVTIKCQASQSIYSSLAWYQQKPGQSPKLLIYDA |
| | | SHLASGVPSRFSGSRYGTEFTLTISGVQSDDAATYYCQGGWYSSAATYVPN |
| | | TFGGGTEVVVKGGGGSGGGGSGGGGSQEQLVESGGGLVQPEGSLTLTCKA |
| | | SGFTISNNYYMCWVRQAPGKGLEWIACIYGGISGRTYYASWAKGRFTISKT |
| | | SSTTVTLQMTSLTAADTATYFCVRGYVGTSNLWGPGTLVTVSSEPKSSDKT |
| | | HTCPPCPAPEAAGGPSVFLFPPKPKDTLMISRTPEVTCVVVSVSHEDPEVKF |
| | | NWYVDGVEVHNAKTKPREEQYNSTYRVVSVLTVLHQDWLNGKEYKCKV |
| | | SNKALPAPIEKTISKAKGQPREPQVYVYPPSRDELTKNQVSLTCLVKGFYPS |
| | | DIAVEWESNGQPENNYKTTPPVLDSDGSFALVSKLTVDKSRWQQGNVFSC |
| | | SVMHEALHNHYTQKSLSLSPG |
| 351 | 22043 | EVQLVESGGGLVQPGGSLRLSCAASGFTFSEFGMHWVRQAPGKGLEWVSY |
| | | ISSGGSTIYYADSVKGRFTISRDNAKNSLYLQMNSLRAEDTAVYYCARDW |
| | | VDYWGQGTLVTVSSASTKGPSVFPLAPSSKSTSGGTAALGCLVKDYFPEPV |
| | | TVSWNSGALTSGVHTFPAVLQSSGLYSLSSVVTVPSSSLGTQTYICNVNHKP |
| | | SNTKVDKKVEPKSCDKTHTCPPCPAPEAAGGPSVFLFPPKPKDTLMISRTPE |
| | | VTCVVVSVSHEDPEVKFNWYVDGVEVHNAKTKPREEQYNSTYRVVSVLT |
| | | VLHQDWLNGKEYKCKVSNKALPAPIEKTISKAKGQPREPQVYVYPPSRDEL |
| | | TKNQVSLTCLVKGFYPSDIAVEWESNGQPENNYKTTPPVLDSDGSFALVSK |
| | | LTVDKSRWQQGNVFSCSVMHEALHNHYTQKSLSLSPG |
| 352 | 22775 | DIQMTQSPSSLSASVGDRVTITCQASQSIYSSLAWYQQKPGKAPKLLIYDAS |
| | | HLASGVPSRFSGSRYGTDFTLTISSVQPEDFATYYCQGGWYSSAATYVPNT |
| | | FGGGTKVEVKGGSGGGSGGGSGGGSGGGSGEVQLVESGGGLVQPGGSLR |
| | | LSCAASGFTISNNYYMCWVRQAPGKGLEWIACIYGGISGRTYYADSAKGR |
| | | FTISKDSSNTVYLQMNSLRAEDTAVYYCYRGYVGTSNLWGQGTLVTVSSG |
| | | GGGEVQLVESGGGLVQPGGSLRLSCAASGFTFSEFGMHWVRQAPGKGLE |
| | | WVSYISSGGSTIYYADSVKGRFTISRDNAKNSLYLQMNSLRAEDTAVYYCA |
| | | RDWVDYWGQGTLVTVSSASTKGPSVFPLAPSSKSTSGGTAALGCLVKDYF |
| | | PEPVTVSWNSGALTSGVHTFPAVLQSSGLYSLSSVVTVPSSSLGTQTYICNV |
| | | NHKPSNTKVDKKVEPKSCDKTHTCPPCPAPEAAGGPSVFLFPPKPKDTLMIS |
| | | RTPEVTCVVVSVSHEDPEVKFNWYVDGVEVHNAKTKPREEQYNSTYRVV |
| | | SVLTVLHQDWLNGKEYKCKVSNKALPAPIEKTISKAKGQPREPQVYVYPPS |
| | | RDELTKNQVSLTCLVKGFYPSDIAVEWESNGQPENNYKTTPPVLDSDGSFA |
| | | LVSKLTVDKSRWQQGNVFSCSVMHEALHNHYTQKSLSLSPG |
| 353 | 22776 | EVQLVESGGGLVQPGGSLRLSCAASGFTFSEFGMHWVRQAPGKGLEWVSY |
| | | ISSGGSTIYYADSVKGRFTISRDNAKNSLYLQMNSLRAEDTAVYYCARDW |
| | | VDYWGQGTLVTVSSASTKGPSVFPLAPSSKSTSGGTAALGCLVKDYFPEPV |
| | | TVSWNSGALTSGVHTFPAVLQSSGLYSLSSVVTVPSSSLGTQTYICNVNHKP |
| | | SNTKVDKKVEPKSCDKTHTCPPCPAPEAAGGPSVFLFPPKPKDTLMISRTPE |
| | | VTCVVVSVSHEDPEVKFNWYVDGVEVHNAKTKPREEQYNSTYRVVSVLT |
| | | VLHQDWLNGKEYKCKVSNKALPAPIEKTISKAKGQPREPQVYVYPPSRDEL |
| | | TKNQVSLTCLVKGFYPSDIAVEWESNGQPENNYKTTPPVLDSDGSFALVSK |
| | | LTVDKSRWQQGNVFSCSVMHEALHNHYTQKSLSLSPGGGGGDIQMTQSPS |
| | | SLSASVGDRVTITCQASQSIYSSLAWYQQKPGKAPKLLIYDASHLASGVPSR |
| | | FSGSRYGTDFTLTISSVQPEDFATYYCQGGWYSSAATYVPNTFGGGTKVEV |
| | | KGGSGGGSGGGSGGGSGGGSGEVQLVESGGGLVQPGGSLRLSCAASGFTIS |
| | | NNYYMCWVRQAPGKGLEWIACIYGGISGRTYYADSAKGRFTISKDSSNTV |
| | | YLQMNSLRAEDTAVYYCVRGYVGTSNLWGQGTLVTVSS |
| 354 | 22777 | EVQLVESGGGLVQPGGSLRLSCAASGFTFSEFGMHWVRQAPGKGLEWVSY |
| | | ISSGGSTIYYADSVKGRFTISRDNAKNSLYLQMNSLRAEDTAVYYCARDW |
| | | VDYWGQGTLVTVSSASTKGPSVFPLAPSSKSTSGGTAALGCLVKDYFPEPV |
| | | TVSWNSGALTSGVHTFPAVLQSSGLYSLSSVVTVPSSSLGTQTYICNVNHKP |
| | | SNTKVDKKVEPKSCDKTHTCPPCPAPEAAGGPSVFLFPPKPKDTLMISRTPE |
| | | VTCVVVSVSHEDPEVKFNWYVDGVEVHNAKTKPREEQYNSTYRVVSVLT |
| | | VLHQDWLNGKEYKCKVSNKALPAPIEKTISKAKGQPREPQVYVLPPSRDEL |
| | | TKNQVSLLCLVKGFYPSDIAVEWESNGQPENNYLTWPPVLDSDGSFFLYSK |
| | | LTVDKSRWQQGNVFSCSVMHEALHNHYTQKSLSLSPGGGGGDIQMTQSPS |
| | | SLSASVGDRVTITCQASQSIYSSLAWYQQKPGKAPKLLIYDASHLASGVPSR |
| | | FSGSRYGTDFTLTISSVQPEDFATYYCQGGWYSSAATYVPNTFGGGTKVEV |
| | | KGGSGGGSGGGSGGGSGGGSGEVQLVESGGGLVQPGGSLRLSCAASGFTIS |
| | | NNYYMCWVRQAPGKGLEWIACIYGGISGRTYYADSAKGRFTISKDSSNTV |
| | | YLQMNSLRAEDTAVYYCVRGYVGTSNLWGQGTLVTVSS |
| 355 | 22782 | EPKSSDKTHTCPPCPAPEAAGGPSVFLFPPKPKDTLMISRTPEVTCVVVSVS |
| | | HEDPEVKFNWYVDGVEVHNAKTKPREEQYNSTYRVVSVLTVLHQDWLN |
| | | GKEYKCKVSNKALPAPIEKTISKAKGQPREPQVYVLPPSRDELTKNQVSLL |
| | | CLVKGFYPSDIAVEWESNGQPENNYLTWPPVLDSDGSFFLYSKLTVDKSR |
| | | WQQGNVFSCSVMHEALHNHYTQKSLSLSPGGGGGDIQMTQSPSSLSASVG |
| | | DRVTITCQASQSIYSSLAWYQQKPGKAPKLLIYDASHLASGVPSRFSGSRYG |
| | | TDFTLTISSVQPEDFATYYCQGGWYSSAATYVPNTFGGGTKVEVKGGSGG |
| | | GSGGGSGGGSGGGSGEVQLVESGGGLVQPGGSLRLSCAASGFTISNNYYM |
| | | CWVRQAPGKGLEWIACIYGGISGRTYYADSAKGRFTISKDSSNTVYLQMNS |
| | | LRAEDTAVYYCVRGYVGTSNLWGQGTLVTVSS |
| 356 | 22789 | EVQLVESGGGLVQPGGSLRLSCAASGFTFSEFGMHWVRQAPGKGLEWVSY |
| | | ISSGGSTIYYADSVKGRFTISRDNAKNSLYLQMNSLRAEDTAVYYCARDW |
| | | VDYWGQGTLVTVSSASTKGPSVFPLAPSSKSTSGGTAALGCLVKDYFPEPV |
| | | TVSWNSGALTSGVHTFPAVLQSSGLYSLSSVVTVPSSSLGTQTYICNVNHKP |
| | | SNTKVDKKVEPKSCDKTHTCPPCPAPEAAGGPSVFLFPPKPKDTLMISRTPE |
| | | VTCVVVSVSHEDPEVKFNWYVDGVEVHNAKTKPREEQYNSTYRVVSVLT |
| | | VLHQDWLNGKEYKCKVSNKALPAPIEKTISKAKGQPREPQVYVYPPSRDEL |
| | | TKNQVSLTCLVKGFYPSDIAVEWESNGQPENNYKTTPPVLDSDGSFALVSK |
| | | LTVDKSRWQQGNVFSCSVMHEALHNHYTQKSLSLSPGGGGGQVQLVQSG |
| | | AEVKKPGASVRVSCRASGYIFTESGITWVRQAPGQGLEWMGWISGYSGDT |
| | | KYAQKLQGRVTMTKDTSTTTAYMELRSLRYDDTAVYYCARDVQYSGSYL |
| | | GAYYFDYWSPGTLVTVSSGGGGSGGGGSGGGGSGGGQSVLTQPPSASGTP |
| | | GQRVTISCSGSSSNIGTNYVYWYQQFPGTAPKLLIYRSYQRPSGVPDRFSGS |
| | | KSGSSASLAISGLQSEDEADYYCATWDDSLDGWVFGGGTKLTVL |
| 357 | 22791 | EVQLVESGGGLVQPGGSLRLSCAASGFTFSEFGMHWVRQAPGKGLEWVSY |
| | | ISSGGSTIYYADSVKGRFTISRDNAKNSLYLQMNSLRAEDTAVYYCARDW |
| | | VDYWGQGTLVTVSSASTKGPSVFPLAPSSKSTSGGTAALGCLVKDYFPEPV |
| | | TVSWNSGALTSGVHTFPAVLQSSGLYSLSSVVTVPSSSLGTQTYICNVNHKP |
| | | SNTKVDKKVEPKSCDKTHTCPPCPAPEAAGGPSVFLFPPKPKDTLMISRTPE |
| | | VTCVVVSVSHEDPEVKFNWYVDGVEVHNAKTKPREEQYNSTYRVVSVLT |
| | | VLHQDWLNGKEYKCKVSNKALPAPIEKTISKAKGQPREPQVYVYPPSRDEL |
| | | TKNQVSLTCLVKGFYPSDIAVEWESNGQPENNYKTTPPVLDSDGSFALVSK |
| | | LTVDKSRWQQGNVFSCSVMHEALHNHYTQKSLSLSPGGGGGDIQMTQSPS |
| | | SLSASVGDRVTITCQASQSIYSSLAWYQQKPGKAPKLLIYDASHLASGVPSR |
| | | FSGSRYGTDFTLTISSVQPEDFATYYCQGGWYSSAATYVPNTFGGGTKVEV |
| | | KRTVAAPSVFIFPPSDEQLKSGTASVVCLLNNFYPREAKVQWKVDNALQSG |
| | | NSQESVTEQDSKDSTYSLSSTLTLSKADYEKVYACEVTHQGLSSPVTKS |
| | | FNRGEC |

[0746] The disclosures of all patents, patent applications, publications and database entries referenced in this specification are hereby specifically incorporated by reference in their entirety to the same extent as if each such individual patent, patent application, publication and database entry were specifically and individually indicated to be incorporated by reference.

[0747] Modifications of the specific embodiments described herein that would be apparent to those skilled in the art are intended to be included within the scope of the following claims.

1. An antibody construct comprising:
a) a first 4-1BB antigen-binding domain that binds to a 4-1BB extracellular domain (4-1BB ECD) and is derived from an agonistic anti-4-1BB antibody, and
b) a first tumor-associated antigen (TAA) antigen binding domain (TAA antigen-binding domain) that binds to a TAA,
wherein the first 4-1BB antigen-binding domain and the first TAA antigen-binding domain are linked directly or indirectly to a scaffold.

2.-4.(canceled)

5. The antibody construct according to claim 1, wherein the first 4-1BB antigen-binding domain comprises: a) a heavy chain variable domain comprising the three heavy chain CDRs of antibody 1C3, and a light chain variable domain comprising the three light chain CDRs of antibody 1C3; b) a heavy chain variable domain comprising the three heavy chain CDRs of antibody 1C8, and a light chain variable domain comprising the three light chain CDRs of antibody 1C8; c) a heavy chain variable domain comprising the three heavy chain CDRs of antibody 1G1, and a light chain variable domain comprising the three light chain CDRs of antibody 1G1; d) a heavy chain variable domain comprising the three heavy chain CDRs of antibody 2E8, and a light chain variable domain comprising the three light chain CDRs of antibody 2E8; e) a heavy chain variable domain comprising the three heavy chain CDRs of antibody 3E7, and a light chain variable domain comprising the three light chain CDRs of antibody 3E7; and f) a heavy chain variable domain comprising the three heavy chain CDRs of antibody 4E6, and a light chain variable domain comprising the three light chain CDRs of antibody 4E6; g) a heavy chain variable domain comprising the three heavy chain CDRs of antibody 5G8, and a light chain variable domain comprising the three light chain CDRs of antibody 5G8; or h) a heavy chain variable domain comprising the three heavy chain CDRs of antibody 6B3, and a light chain variable domain comprising the three light chain CDRs of antibody 6B3.

6. The antibody construct according to claim 5, wherein the first 4-1BB antigen-binding domain is a human or humanized antigen-binding domain.

7. The antibody construct according to claim 6, wherein the first 4-1BB antigen-binding domain comprises:
a) a heavy chain variable domain (VH) sequence that is at least 85% identical to the VH sequence of v28726 and a light chain variable domain (VL) sequence that is at least 85% identical to the VL sequence of v28726;
b) a heavy chain variable domain (VH) sequence that is at least 85% identical to the VH sequence of v28727 and a light chain variable domain (VL) sequence that is at least 85% identical to the VL sequence of v28727;
c) a heavy chain variable domain (VH) sequence that is at least 85% identical to the VH sequence of v28728 and a light chain variable domain (VL) sequence that is at least 85% identical to the VL sequence of v28728;
d) a heavy chain variable domain (VH) sequence that is at least 85% identical to the VH sequence of v28730 and a light chain variable domain (VL) sequence that is at least 85% identical to the VL sequence of v28730;
e) a heavy chain variable domain (VH) sequence that is at least 85% identical to the VH sequence of v28700 and a light chain variable domain (VL) sequence that is at least 85% identical to the VL sequence of v28700;
f) a heavy chain variable domain (VH) sequence that is at least 85% identical to the VH sequence of v28704 and a light chain variable domain (VL) sequence that is at least 85% identical to the VL sequence of v28704;
g) a heavy chain variable domain (VH) sequence that is at least 85% identical to the VH sequence of v28705 and a light chain variable domain (VL) sequence that is at least 85% identical to the VL sequence of v28705;
h) a heavy chain variable domain (VH) sequence that is at least 85% identical to the VH sequence of v28706 and a light chain variable domain (VL) sequence that is at least 85% identical to the VL sequence of v28706;
i) a heavy chain variable domain (VH) sequence that is at least 85% identical to the VH sequence of v28711 and a light chain variable domain (VL) sequence that is at least 85% identical to the VL sequence of v28711;
j) a heavy chain variable domain (VH) sequence that is at least 85% identical to the VH sequence of v28712 and a light chain variable domain (VL) sequence that is at least 85% identical to the VL sequence of v28712;
k) a heavy chain variable domain (VH) sequence that is at least 85% identical to the VH sequence of v28713 and a light chain variable domain (VL) sequence that is at least 85% identical to the VL sequence of v28713;
l) a heavy chain variable domain (VH) sequence that is at least 85% identical to the VH sequence of v28696 and a light chain variable domain (VL) sequence that is at least 85% identical to the VL sequence of v28696;
m) a heavy chain variable domain (VH) sequence that is at least 85% identical to the VH sequence of v28697 and a light chain variable domain (VL) sequence that is at least 85% identical to the VL sequence of v28697;
n) a heavy chain variable domain (VH) sequence that is at least 85% identical to the VH sequence of v28698 and a light chain variable domain (VL) sequence that is at least 85% identical to the VL sequence of v28698;
o) a heavy chain variable domain (VH) sequence that is at least 85% identical to the VH sequence of v28701 and a light chain variable domain (VL) sequence that is at least 85% identical to the VL sequence of v28701;
p) a heavy chain variable domain (VH) sequence that is at least 85% identical to the VH sequence of v28702 and a light chain variable domain (VL) sequence that is at least 85% identical to the VL sequence of v28702;
q) a heavy chain variable domain (VH) sequence that is at least 85% identical to the VH sequence of v28703 and a light chain variable domain (VL) sequence that is at least 85% identical to the VL sequence of v28703;
r) a heavy chain variable domain (VH) sequence that is at least 85% identical to the VH sequence of v28707 and a light chain variable domain (VL) sequence that is at least 85% identical to the VL sequence of v28707;
s) a heavy chain variable domain (VH) sequence that is at least 85% identical to the VH sequence of v28683 and a light chain variable domain (VL) sequence that is at least 85% identical to the VL sequence of v28683;
t) a heavy chain variable domain (VH) sequence that is at least 85% identical to the VH sequence of v28684 and a light chain variable domain (VL) sequence that is at least 85% identical to the VL sequence of v28684;
u) a heavy chain variable domain (VH) sequence that is at least 85% identical to the VH sequence of v28685 and a light chain variable domain (VL) sequence that is at least 85% identical to the VL sequence of v28685;
v) a heavy chain variable domain (VH) sequence that is at least 85% identical to the VH sequence of v28686 and a light chain variable domain (VL) sequence that is at least 85% identical to the VL sequence of v28686;
w) a heavy chain variable domain (VH) sequence that is at least 85% identical to the VH sequence of v28687 and a light chain variable domain (VL) sequence that is at least 85% identical to the VL sequence of v28687;
x) a heavy chain variable domain (VH) sequence that is at least 85% identical to the VH sequence of v28688 and a light chain variable domain (VL) sequence that is at least 85% identical to the VL sequence of v28688;
y) a heavy chain variable domain (VH) sequence that is at least 85% identical to the VH sequence of v28689 and a light chain variable domain (VL) sequence that is at least 85% identical to the VL sequence of v28689;
z) a heavy chain variable domain (VH) sequence that is at least 85% identical to the VH sequence of v28690 and a light chain variable domain (VL) sequence that is at least 85% identical to the VL sequence of v28690;
aa) a heavy chain variable domain (VH) sequence that is at least 85% identical to the VH sequence of v28691 and a light chain variable domain (VL) sequence that is at least 85% identical to the VL sequence of v28691;
bb) a heavy chain variable domain (VH) sequence that is at least 85% identical to the VH sequence of v28692 and a light chain variable domain (VL) sequence that is at least 85% identical to the VL sequence of v28692;
cc) a heavy chain variable domain (VH) sequence that is at least 85% identical to the VH sequence of v28694 and a light chain variable domain (VL) sequence that is at least 85% identical to the VL sequence of v28694;
dd) a heavy chain variable domain (VH) sequence that is at least 85% identical to the VH sequence of v28695 and a light chain variable domain (VL) sequence that is at least 85% identical to the VL sequence of v28695; or
ee) a heavy chain variable domain (VH) sequence that is at least 85% identical to the VH sequence of v28693 and a light chain variable domain (VL) sequence that is at least 85% identical to the VL sequence of v28693.

8. The antibody construct according to claim 7, further comprising a second 4-1BB antigen binding domain.

9. (canceled)

10. The antibody construct according to claim 8, wherein the second 4-1BB antigen-binding domain is the same as the first 4-1BB antigen-binding domain.

11. The antibody construct according to claim 10, wherein the first 4-1BB antigen-binding domain and/or the second 4-1BB antigen-binding domain are in a Fab format.

12. The antibody construct according to claim 11, wherein the first TAA antigen-binding domain is a folate receptor-α (FRα) antigen-binding domain, a Solute Carrier Family 34 Member 2 (NaPi2b) antigen-binding domain, a HER2 antigen-binding domain, a mesothelin antigen-binding domain, or a Solute Carrier Family 39 Member 6 (LIV-1) antigen-binding domain.

13. The antibody construct according to claim 12, wherein the antibody construct comprises a second TAA antigen-binding domain.

14. The antibody construct according to claim 13, wherein the first and second TAA antigen-binding domain bind to the same TAA.

15. The antibody construct according to claim 12, wherein the first TAA antigen-binding domain is a FRα antigen-binding domain.

16. The antibody construct according to claim 15, wherein the FRα antigen-binding domain comprises: a) a heavy chain variable domain comprising the three heavy chain CDRs of antibody 8K22, and a light chain variable domain comprising the three light chain CDRs of antibody 8K22; or b) heavy chain variable domain comprising the three heavy chain CDRs of antibody 1H06, and a light chain variable domain comprising the three light chain CDRs of antibody 1H06.

17. The antibody construct according to claim 16, wherein the FRα antigen-binding domain is a human or humanized antigen-binding domain.

18. The antibody construct according to claim 17, wherein the FRα antigen-binding domain comprises:
a) a heavy chain variable domain (VH) sequence that is at least 85% identical to the VH sequence of v23794 and a light chain variable domain (VL) sequence that is at least 85% identical to the VL sequence of v23794;
b) a heavy chain variable domain (VH) sequence that is at least 85% identical to the VH sequence of v23795 and a light chain variable domain (VL) sequence that is at least 85% identical to the VL sequence of v23795;
c) a heavy chain variable domain (VH) sequence that is at least 85% identical to the VH sequence of v23796 and a light chain variable domain (VL) sequence that is at least 85% identical to the VL sequence of v23796;
d) a heavy chain variable domain (VH) sequence that is at least 85% identical to the VH sequence of v23797 and a light chain variable domain (VL) sequence that is at least 85% identical to the VL sequence of v23797;
e) a heavy chain variable domain (VH) sequence that is at least 85% identical to the VH sequence of v23798 and a light chain variable domain (VL) sequence that is at least 85% identical to the VL sequence of v23798;
f) a heavy chain variable domain (VH) sequence that is at least 85% identical to the VH sequence of v23799 and a light chain variable domain (VL) sequence that is at least 85% identical to the VL sequence of v23799;
g) a heavy chain variable domain (VH) sequence that is at least 85% identical to the VH sequence of v23800 and a light chain variable domain (VL) sequence that is at least 85% identical to the VL sequence of v23800;
h) a heavy chain variable domain (VH) sequence that is at least 85% identical to the VH sequence of v23801 and a light chain variable domain (VL) sequence that is at least 85% identical to the VL sequence of v23801;
i) a heavy chain variable domain (VH) sequence that is at least 85% identical to the VH sequence of v23802 and a light chain variable domain (VL) sequence that is at least 85% identical to the VL sequence of v23802;
j) a heavy chain variable domain (VH) sequence that is at least 85% identical to the VH sequence of v23803 and a light chain variable domain (VL) sequence that is at least 85% identical to the VL sequence of v23803;
k) a heavy chain variable domain (VH) sequence that is at least 85% identical to the VH sequence of v23804 and a light chain variable domain (VL) sequence that is at least 85% identical to the VL sequence of v23804;
l) a heavy chain variable domain (VH) sequence that is at least 85% identical to the VH sequence of v23805 and a light chain variable domain (VL) sequence that is at least 85% identical to the VL sequence of v23805;
m) a heavy chain variable domain (VH) sequence that is at least 85% identical to the VH sequence of v23806 and a light chain variable domain (VL) sequence that is at least 85% identical to the VL sequence of v23806;
n) a heavy chain variable domain (VH) sequence that is at least 85% identical to the VH sequence of v23807 and a light chain variable domain (VL) sequence that is at least 85% identical to the VL sequence of v23807;
o) a heavy chain variable domain (VH) sequence that is at least 85% identical to the VH sequence of v23808 and a light chain variable domain (VL) sequence that is at least 85% identical to the VL sequence of v23808;
p) a heavy chain variable domain (VH) sequence that is at least 85% identical to the VH sequence of v23809 and a light chain variable domain (VL) sequence that is at least 85% identical to the VL sequence of v23809;
q) a heavy chain variable domain (VH) sequence that is at least 85% identical to the VH sequence of v23810 and a light chain variable domain (VL) sequence that is at least 85% identical to the VL sequence of v23810;
r) a heavy chain variable domain (VH) sequence that is at least 85% identical to the VH sequence of v23811 and a light chain variable domain (VL) sequence that is at least 85% identical to the VL sequence of v23811;
s) a heavy chain variable domain (VH) sequence that is at least 85% identical to the VH sequence of v23812 and a light chain variable domain (VL) sequence that is at least 85% identical to the VL sequence of v23812;
t) a heavy chain variable domain (VH) sequence that is at least 85% identical to the VH sequence of v23813 and a light chain variable domain (VL) sequence that is at least 85% identical to the VL sequence of v23813;
u) a heavy chain variable domain (VH) sequence that is at least 85% identical to the VH sequence of v23814 and a light chain variable domain (VL) sequence that is at least 85% identical to the VL sequence of v23814;
v) a heavy chain variable domain (VH) sequence that is at least 85% identical to the VH sequence of v23815 and a light chain variable domain (VL) sequence that is at least 85% identical to the VL sequence of v23815;
w) a heavy chain variable domain (VH) sequence that is at least 85% identical to the VH sequence of v23816 and a light chain variable domain (VL) sequence that is at least 85% identical to the VL sequence of v23816;
x) a heavy chain variable domain (VH) sequence that is at least 85% identical to the VH sequence of v23817 and a light chain variable domain (VL) sequence that is at least 85% identical to the VL sequence of v23817; or
y) a heavy chain variable domain (VH) sequence that is at least 85% identical to the VH sequence of v23818 and a light chain variable domain (VL) sequence that is at least 85% identical to the VL sequence of v23818.

19. The antibody construct according to claim 12, wherein the TAA antigen-binding domain is in an scFv format.

20. The antibody construct according to claim 12, wherein the TAA antigen-binding domain is in a Fab format.

21. The antibody construct according to claim 12, wherein the scaffold is a dimeric Fc construct having a first Fc polypeptide and a second Fc polypeptide, each Fc polypeptide comprising a CH3 sequence, or wherein the scaffold is a linker or an albumin polypeptide.

22. The antibody construct according to claim 21, wherein the scaffold is a heterodimeric Fc construct having a first Fc polypeptide that is different from the second Fc polypeptide, and wherein the CH3 sequences of the first Fc polypeptide and the second Fc polypeptide comprise amino acid substitutions that promote the formation of a heterodimeric Fc.

23. The antibody construct according to claim 22, wherein:
a) one Fc polypeptide comprises the amino acid substitutions T350V_L351Y_F405A_Y407V and the other Fc polypeptide comprises the amino acid substitutions T350V_T366L_K392L_T394W;
b) one Fc polypeptide comprises the amino acid substitutions T350V_T366L_K392M_T394W and the other Fc polypeptide comprises the amino acid substitutions T350V_L351Y_F405A_Y407V;
c) one Fc polypeptide comprises the amino acid substitutions L351Y_F405A_Y407V and the other Fc polypeptide comprises the amino acid substitutions T366L_K392M_T394W;
d) one Fc polypeptide comprises the amino acid substitutions L351Y_F405A_Y407V and the other Fc polypeptide comprises the amino acid substitutions T366L_K392L_T394W; or e) one Fc polypeptide comprises the amino acid substitutions L351Y_S400E_F405A_Y407V and the other Fc polypeptide comprises the amino acid substitutions T366I_N390R_K392M_T394W,
wherein the numbering of residues is according to the EU numbering system.

24. The antibody construct according to claim 21, further comprising one or more amino acid modifications that reduce effector function.

25. (canceled)

26. The antibody construct according to claim 1, wherein the first 4-1BB antigen-binding domain is linked to the N terminus of the first Fc polypeptide, and the first TAA antigen-binding domain is linked to the C terminus of the first Fc polypeptide.

27. The antibody construct according to claim 1, wherein the first 4-1BB antigen-binding domain is linked to the N terminus of the first Fc polypeptide, and the first TAA antigen-binding domain is linked to the C terminus of the second Fc polypeptide

28. The antibody construct according to claim 8, wherein the first 4-1BB antigen-binding domain is linked to the N terminus of the first Fc polypeptide, and the first TAA antigen-binding domain is linked to the C terminus of the first Fc polypeptide, and the second 4-1BB antigen-binding domain is linked to the N terminus of the second Fc polypeptide.

29. (canceled)

30. The antibody construct according to claim 13, wherein the first 4-1BB antigen-binding domain is linked to the N terminus of the first Fc polypeptide or to the N terminus of the second Fc polypeptide, the first TAA antigen-binding domain is linked to the C terminus of the first Fc polypeptide and a second TAA antigen-binding domain is linked to the C terminus of the second Fc polypeptide.

31. The antibody construct according to claim 15, wherein the first and second 4-1BB antigen-binding domains comprise a heavy chain variable domain comprising the three heavy chain CDRs of antibody 1G1, and a light chain variable domain comprising the three light chain CDRs of antibody 1G1, and the first and/or second FRα antigen-binding domain comprises a heavy chain variable domain comprising the three heavy chain CDRs of antibody 8K22, and a light chain variable domain comprising the three light chain CDRs of antibody 8K22.

32. The antibody construct according to claim 31, wherein the first and second 4-1BB antigen-binding domain comprises a heavy chain variable domain (VH) sequence that is at least 85% identical to the VH sequence of v28684 and a light chain variable domain (VL) sequence that is at least 85% identical to the VL sequence of v28684, and the first and/or second FRα antigen-binding domain comprises a heavy chain variable domain (VH) sequence that is at least 85% identical to the VH sequence of v23807 and a light chain variable domain (VL) sequence that is at least 85% identical to the VL sequence of v23807.

33. The antibody construct according to claim 32, comprising a first heavy chain polypeptide sequence as set forth in SEQ ID NO:353, a second heavy chain polypeptide sequence as set forth in SEQ ID NO:349, and a light chain polypeptide sequence as set forth in SEQ ID NO:346.

34. The antibody construct according to claim 1, conjugated to a drug.

35. A pharmaceutical composition comprising the antibody construct of claim 1.

36. One or more nucleic acids encoding the antibody construct according to claim 1.

37. One or more vectors comprising the one or more nucleic acids according to claim 36.

38. An isolated cell comprising the one or more nucleic acid according to claim 36.

39. A method of preparing the antibody construct according to claim 1, comprising culturing an isolated cell of claim 38 comprising one or more nucleic acids encoding the antibody construct under conditions suitable for expressing the antibody construct, and purifying the antibody construct.

40. A method of treating a subject having a cancer, comprising administering to the subject an effective amount of the antibody construct according to claim 1.

41.-43. (canceled)

44. An antibody construct or antigen-binding fragment thereof, that specifically binds to 4-1BB, comprising: a heavy chain variable sequence comprising three heavy chain CDRs and a light chain variable sequence comprising three light chain CDRs, wherein the heavy chain CDRs and the light chain CDRs are from any one of antibodies 1G1, 1B2, 1C3, 1C8, 2A7, 2E8, 2H9, 3D7, 3H1, 3E7, 3G4, 4B11, 4E6, 4F9, 4G10, 5E2, 5G8, or 6B3.

45.-64. (canceled)

65. An antibody construct or antigen-binding fragment thereof, that specifically binds to FRα, comprising: a heavy chain variable (VH) sequence comprising three CDRs and a light chain variable (VL) sequence comprising three CDRs, wherein the heavy chain CDRs and the light chain CDRs are from antibody 8K22 or 1H06.

66.-83. (canceled)

The application's sequence listing, which the Patent Office published only in electronic form, follows.

SEQUENCE LISTING (787 sequences)

SEQ ID NO: 1 - protein, 23 aa, Artificial Sequence
  Signal peptide
MRPTWAWWLFLVLLLALWAPARG

SEQ ID NO: 2 - protein, 25 aa, Artificial Sequence
  Signal peptide
MAVMAPRTLVLLLSGALALTQTWAG

SEQ ID NO: 3 - protein, 115 aa, Artificial Sequence
  Antibody 1B2 VH
QVQLQQPGAELVKPGASVKLSCKASGYTFTSFWINWVKQRPGQGLEWIGNIYPDSSSTNYNEKFKNKATLTVDTSSSTAYMQLSSLTSDDSAVYFCARSLTFDYWGQGTTLTVSS

SEQ ID NO: 4 - protein, 112 aa, Artificial Sequence
  Antibody 1B2 VL
DVVMTQTPLSLPVSLGDQASISCRSSQSIVHSNGNTYLEWYLQKPGQSPKLLIYKVSNRFSGVPDRFSARGSGTDFSLKISRVEAEDLGVYYCFQGSHVPYTFGGGTKLEIK

SEQ ID NO: 5 - protein, 118 aa, Artificial Sequence
  Antibody 1C3 VH
QVQLKQSGPGLVQPSQSLSITCTVSGFSLTSYGVHWVRQSPGKGLEWLGVIWRGGSTDYNAAFISRLSISKDNSKSQVFFKMNSLQADDTAIYYCARENYDYDEFAYWGQGTLVTVSA

SEQ ID NO: 6 - protein, 112 aa, Artificial Sequence; identical to SEQ ID NO: 4
  Antibody 1C3 VL

SEQ ID NO: 7 - protein, 117 aa, Artificial Sequence
  Antibody 1C8 VH
QVQLKESGPGLVAPSQSLSITCTVSGFSLTTYAISWVRQPPGKGLEWLGIIWPGGGTNYNSALKSRLSISKDNSRSQVFLKMNSLQTDDTARYYCARGAGTWYFDVWGAGTTVTVSS

SEQ ID NO: 8 - protein, 107 aa, Artificial Sequence
  Antibody 1C8 VL
DIQMTQSTSSLSASVGDRVTISCSASQGISNYLNWYQQKPDGTVKLLIYYTSSLHSGVPSRFSGSGSGTDYSLTISNLEPEDIATYYCQQYSKFPWTFGGGTKLEIK

SEQ ID NO: 9 - protein, 114 aa, Artificial Sequence
  Antibody 1G1 VH
EVQLVESGGGLVKPGGSRKLSCAASGFTFSEFGMHWVRQAPDKGLKWVAYISSGGSTIYYADTVKGRFTISRDNAKNTLFLQMTSLRSEDTAMYYCARDWVDYWGQGTTLTVSS

SEQ ID NO: 10 - protein, 107 aa, Artificial Sequence
  Antibody 1G1 VL
NIVMTQSPKSMSMSVGERVTLSCKASENVGSYVSWYQQKPEKSPKLLIYGASNRYTGVPDRFTGSGSATDFTLTISSVQAEDLADYHCGQSYSYPLTFGAGTKLELK

SEQ ID NO: 11 - protein, 119 aa, Artificial Sequence
  Antibody 2A7 VH
EVQLQQSGPELVKPGASVKMSCKASGYTFTSYVMHWVKQKPGQGLEWIGYINPYNDGTKYNEKFKGKATLTSDKSSSTAYMELSSLTSEDSAVYYCARLGSRGTWFAYWGQGTLVTVSA

SEQ ID NO: 12 - protein, 107 aa, Artificial Sequence
  Antibody 2A7 VL
DIVMTQSHKFMSTSVGDRVSITCKASQDVGTAVGWYQQKLGQSPKLLIYWASTRRTGVPDRFTGSGSGTDFTLTISNVQSEDLADYFCQQYSSYPLTFGAGTKLELK

SEQ ID NO: 13 - protein, 118 aa, Artificial Sequence
  Antibody 2E8 VH
QVQLKQSGPGLVQPSQSLSITCTVSGFSLTSYGVHWVRQSPGKGLEWLGVIWSGGSTDYNAAFISRLSISKDNSKSQVFFKMNSLQADDTAIYYCARNPLTATVMDYWGQGTSVTVSS

SEQ ID NO: 14 - protein, 107 aa, Artificial Sequence
  Antibody 2E8 VL
DIVMTQSQKFMSTSVGDRVSVTCKASQNVGTNVAWYQQKPGQSRTVLIYSASYRHSGVPDRFTGSGSGTDFTLTISNVQSEDLAEYFCQQYNSYPLTFGTGTKLELK

SEQ ID NO: 15 - protein, 120 aa, Artificial Sequence
  Antibody 2H9 VH
QVQLQQPGAELVRPGASVKLSCKASGYPFTSYWMSWVKQRPEQGLEWIGRIDPYDSETHYNQKFKDKAILTVDKSSSTAYMQLSSLTSEDSAVYYCARTYYGNYDAMDYWGQGTSVTVSS

SEQ ID NO: 16 - protein, 112 aa, Artificial Sequence
  Antibody 2H9 VL
DIVMTQAAFSNPVTLGTSASISCRSSKSLLHSYGITYLYWYLQKPGQSPQLLIYQMSNLASGVPDRFSSSGSGTDFTLRISRVEAEDVGVYYCAQNLELPLTFGAGTKLELK

SEQ ID NO: 17 - protein, 121 aa, Artificial Sequence
  Antibody 3D7 VH
QVQLQQPGAELVRPGASVKLSCKASGYTFTSYWINWVKQRPGQGLEWIGNIYPSDNYTNYNQKFKDKATLTVDKSSSTAYMQLSSPTSEDSAVYYCTRGGGIYYENYFDYWGQGTTLTVSS

SEQ ID NO: 18 - protein, 106 aa, Artificial Sequence
  Antibody 3D7 VL
QIVLTQSPAIMSASPGEKVTMTCSASSSVSYMHWYQQKSGTSPKRWVYDTSKLASGVPARFSGSGSGTSYSLTISSMEAEDVATYYCQQWSSNPPTFGGGTKLEIK

SEQ ID NO: 19 - protein, 124 aa, Artificial Sequence
  Antibody 3H1 VH
QVHLQQSGSELRIPGSSVKLSCKDFDSEVFPIAYMSWVRQKPGHGFEWIGDILPSIGRTIYGEKFEDKATLDADTVSNTAYLDLNSLTSEDSAIYYCSRGDYYYGSREYAMDYWGQGTSVTVSS

SEQ ID NO: 20 - protein, 112 aa, Artificial Sequence
  Antibody 3H1 VL
DVVMTQTPLSLPVSLGDQASISCRSSQSLVHSNGNTYLHWYLQKPGQSPKLLIYKVSNRFFGVPDRFSGSGSGTDFTLKISRVEAEDLGVYFCSQTTYVPLTFGAGTKLELK

SEQ ID NO: 21 - protein, 114 aa, Artificial Sequence
  Antibody 3E7 VH
QVQLQESGGGLVKPGGSRKLSCAASGFTFSEFGMHWVRQAPDKGLEWVAYISSGSSTIYYADTVKGRFTISRDNAKNTLFLQMTSLRSEDTAMYYCARDWVDYWGQGTALTVSS

SEQ ID NO: 22 - skipped

SEQ ID NO: 23 - protein, 116 aa, Artificial Sequence
  Antibody 3G4 VH
QVQLKQSGPGLVQPSQSLSITCTVSGFSLTSYGVHWVRQSPGKGLEWLGVIWSGGSTDYNGAFISRLSISKDNSKSQVFFKMNSLQADDTAMYFCARDRGGGFDYWGQGTTLTVSS

SEQ ID NO: 24 - protein, 115 aa, Artificial Sequence
  Antibody 3G4 VL
DIVMTQSPSSLAVTAGEKVTMRCKSSQSLLWSVNQNNYLSWYQQKQGQPPKLLIYGASIRESWVPDRFTGSGSGTDFTLTISNVHAEDLAVYYCQHNHGSFLPYTFGGGTKLEIK

SEQ ID NO: 25 - protein, 115 aa, Artificial Sequence
  Antibody 4B11 VH
QVQLQQSGPELVKPGASVKISCKASGYVFSSYWMNWVKQRPGKGLEWIGRIYPGNGDTNYNGKFKDKATLTADKFSSTAYMQLSNLTSEDSAVYFCASYYELDYWGQGTSVTVSS

SEQ ID NO: 26 - protein, 112 aa, Artificial Sequence; identical to SEQ ID NO: 20
  Antibody 4B11 VL

SEQ ID NO: 27 - protein, 117 aa, Artificial Sequence
  Antibody 4E6 VH
QVQLKESGPGLVAPSQSLSITCTVSGFSLTSYAINWVRQPPGKGLEWLGVLWPGGGTNYNSALKSRLSISKDNSKSQVFLKMNSLQTDDTARYYCARGSGTWYFDVWGAGTTVTVSS

SEQ ID NO: 28 - protein, 107 aa, Artificial Sequence
  Antibody 4E6 VL
DIQMTQTTSSLSASLGDRVTFSCSASQGISNYLNWYQQKPDGTVKLLIYYTSSLHLGVPSRFSGSGSGTDYSLTISNLEPEDIATYYCQQYSKLPWTFGGGTKLEIK

SEQ ID NO: 29 - protein, 116 aa, Artificial Sequence
  Antibody 4F9 VH
QVQLQQPGAELVKPGASVMLSCKASGYTFTSYWMHWVKQRPGQGLEWIGEINLRNGGTNYYEKFKTRATLTVDKSSSTAYMQLSSLTSEDSAVYYCTILTSAPSYWGQGTLVTVSA

SEQ ID NO: 30 - protein, 107 aa, Artificial Sequence
  Antibody 4F9 VL
NIVMTQSPKSMSMSVGERVTLSCKASDNVGISVSWYQQKPEQSPKLLIYGASNRYTGVPDRFTGTGSATDFTLTISSVQAEDLADYHCGQSYSYPFTFGSGTKLEIK

SEQ ID NO: 31 - protein, 112 aa, Artificial Sequence
  Antibody 4G10 VH
QLQESGAELLRPGASVKLSCTASGFNIKDDYLHWVKQRPEQGLEWIGWIDPENGDTEYASKFQGKATIKADTSSNTAYLQLSSLTSEDTAVYYCSTQGFACWGQGTLVTVSA

SEQ ID NO: 32 - protein, 112 aa, Artificial Sequence
  Antibody 4G10 VL
DIVMTQAAFSNPVTLGTSASISCRSNKSLLHSDGITYLFWYLQRPGQSPQLLIYRMSNLASGVPDRFSGSGSGTDFTLRISRVEAEDVGVYYCAQMVEFPRTFGGGTKLEIK

SEQ ID NO: 33 - protein, 121 aa, Artificial Sequence
  Antibody 5E2 VH
EVKLVESEGGLVQPGSSMKLSCTASGFTFSDYYMAWVRQVPEKGLEWVAHINYDGSGTYYLDSLKGRFIISRDNAKNILYLQMSSLKSEDTATYYCARDCYGSSSYAVDYWGQGTSVTVSS

SEQ ID NO: 34 - protein, 112 aa, Artificial Sequence
  Antibody 5E2 VL
DVLMTQTPLSLPVSLGDQASISCRSSQSIVHSNGNTYLEWYLQKPGQSPKLLIYKVSNRFSGVPDRFSGSGSGTDFTLKISRVEAEDLGVYYCFQGSHVPWTFGGGTKLEIK

SEQ ID NO: 35 - protein, 118 aa, Artificial Sequence
  Antibody 5G8 VH
QVQLQESGPGLVQPTQSLSITCTVSGFSLISYGVHWVRQSPGKGLEWLGVIWSGGSTDYNAAFISRLSISKDNSKSQVFFKMNSLQADDTAIYYCARNPLTATVMDYWGQGTSVTVSS

SEQ ID NO: 36 - protein, 107 aa, Artificial Sequence
  Antibody 5G8 VL
DIVMTQSQKFMSTSVGDRVSVTCKASQNVGTNVAWYQQKPGQSPKALIYSASYRDSGVPDRFTGSGSGTDFTLTISNVQSEDLAEYLCQQYNSYPLTFGAGTKLELK

SEQ ID NO: 37 - protein, 117 aa, Artificial Sequence
  Antibody 6B3 VH
QVQLKESGPGLVAPSQSLSITCTVSGFSLTSYAISWVRQPPGKGLEWLGVIWPGGGTNYNSALKSRLSISKDNSKSQVFLKMNSLQTDDTARYYCARGTGTWYFDVWGAGTTVTVSS

SEQ ID NO: 38 - protein, 107 aa, Artificial Sequence
  Antibody 6B3 VL
DIQMTQTTSSLSASLGDRVTISCSASQGISNYLNWYQQKPDGTVKLLIYYTSSLHSGVPSRFSGSGSGTDYSLTISNLEPEDIATYYCQQYSDLPWTFGGGTKLEIK

SEQ ID NO: 39 - protein, 413 aa, Artificial Sequence
  4-1BB human
LQDPCSNCPAGTFCDNNRNQICSPCPPNSFSSAGGQRTCDICRQCKGVFRTRKECSSTSNAECDCTPGFHCLGAGCSMCEQDCKQGQELTKKGCKDCCFGTFNDQKRGICRPWTNCSLDGKSVLVNGTKERDVVCGPSPADLSPGASSVTPPAPAREPGHSPQENLYFQSPKSCDKTHTCPPCPAPELLGGPSVFLFPPKPKDTLMISRTPEVTCVVVDVSHEDPEVKFNWYVDGVEVHNAKTKPREEQYNSTYRVVSVLTVLHQDWLNGKEYKCKVSNKALPAPIEKTISKAKGQPREPQVYTLPPSRDELTKNQVSLTCLVKGFYPSDIAVEWESNGQPENNYKTTPPVLDSDGSFFLYSKLTVDKSRWQQGNVFSCSVMHEALHNHYTQKSLSLSPGKGGHHHHHHHHHH

SEQ ID NO: 40 - protein, 413 aa, Artificial Sequence
  4-1BB dog-human
LQDPCSNCPAGTFCDNNRNQICSPCPPNSFSSAGGQRTCDICRQCKGVFRTRKECSSTSNAECDCTPGFHCLGAGCSMCEQDCKQGQELTKQGCKDCRFGTFNDQKRGICQPWTNCSLDGKSVLVNGTKESDAVCGPSPADLSPGASSVTPPAPAREPGHSPQENLYFQSPKSCDKTHTCPPCPAPELLGGPSVFLFPPKPKDTLMISRTPEVTCVVVDVSHEDPEVKFNWYVDGVEVHNAKTKPREEQYNSTYRVVSVLTVLHQDWLNGKEYKCKVSNKALPAPIEKTISKAKGQPREPQVYTLPPSRDELTKNQVSLTCLVKGFYPSDIAVEWESNGQPENNYKTTPPVLDSDGSFFLYSKLTVDKSRWQQGNVFSCSVMHEALHNHYTQKSLSLSPGKGGHHHHHHHHHH

SEQ ID NO: 41 - protein, 414 aa, Artificial Sequence
  4-1BB dog
IQDSCSKCPAGTFCGKNKSQICIPCPPNSFSSTSGQKACDICRQCEGVFRTKKVCSPISNAECECISGFHCLGAGCTMCEQDCKQGQELTKQGSCKDCRFGTFNDQKHGICQPWTNCSLDGKSVLVNGTKESDAVCGPASAGFSPGTASATTPAPARDPGHTSQENLYFQSPKSCDKTHTCPPCPAPELLGGPSVFLFPPKPKDTLMISRTPEVTCVVVDVSHEDPEVKFNWYVDGVEVHNAKTKPREEQYNSTYRVVSVLTVLHQDWLNGKEYKCKVSNKALPAPIEKTISKAKGQPREPQVYTLPPSRDELTKNQVSLTCLVKGFYPSDIAVEWESNGQPENNYKTTPPVLDSDGSFFLYSKLTVDKSRWQQGNVFSCSVMHEALHNHYTQKSLSLSPGKGGHHHHHHHHHH

SEQ ID NO: 42 - protein, 23 aa, Artificial Sequence
  Signal peptide
MGNSCYNIVATLLLVLNFERTRS

SEQ ID NO: 43 - protein, 215 aa, Artificial Sequence
  Cyno 4-1BB-Flag
MGNSCYNIVATLLLVLNFERTRSLQDLCSNCPAGTFCDNNRSQICSPCPPNSFSSAGGQRTCDICRQCKGVFKTRKECSSTSNAECDCISGYHCLGAECSMCEQDCKQGQELTKKGCKDCCFGTFNDQKRGICRPWTNCSLDGKSVLVNGTKERDVVCGPSPADLSPGASSATPPAPAREPGHSPQIIFFLALTSTVVLFLLFFLVLDYKDDDDK

SEQ ID NO: 44 - protein, 216 aa, Artificial Sequence
  Mouse 4-1BB-Flag
MGNNCYNVVVIVLLLVGCEKVGAVQNSCDNCQPGTFCRKYNPVCKSCPPSTFSSIGGQPNCNICRVCAGYFRFKKFCSSTHNAECECIEGFHCLGPQCTRCEKDCRPGQELTKQGCKTCSLGTFNDQNGTGVCRPWTNCSLDGRSVLKTGTTEKDVVCGPPVVSFSPSTTISVTPEGGPGGHSLQVLTLFLALTSALLLALIFITLLFDYKDDDDK

SEQ ID NO: 45 - protein, 117 aa, Artificial Sequence
  Humanized 1C8 VH H5
EVQLVESGGGLIQPGGSLRLSCAASGFSLTTYAISWVRQAPGKGLEWVSIIWPGGGTNYADSVKGRFTISRDNSKNTLYLQMNSLRAEDTAVYYCARGAGTWYFDVWGQGTLVTVSS

SEQ ID NO: 46 - protein, 114 aa, Artificial Sequence
  Humanized 1G1 VH H1
EVQLVESGGGLVQPGGSLRLSCAASGFTFSEFGMHWVRQAPGKGLEWVSYISSGGSTIYYADSVKGRFTISRDNAKNSLYLQMNSLRAEDTAVYYCARDWVDYWGQGTLVTVSS

SEQ ID NO: 47 - protein, 118 aa, Artificial Sequence
  Humanized 5G8 VH H1
QVQLQESGPGLVKPSETLSLTCTVSGFSLISYGVHWIRQPPGKGLEWIGVIWSGGSTDYNPSLKSRVTISVDTSKNQFSLKLSSVTAADTAVYYCARNPLTATVMDYWGQGTLVTVSS

SEQ ID NO: 48 - protein, 107 aa, Artificial Sequence
  Humanized 1C8 VL L1
DIQMTQSPSSLSASVGDRVTITCSASQGISNYLNWYQQKPGKAPKLLIYYTSSLHSGVPSRFSGSGSGTDFTFTISSLQPEDIATYYCQQYSKFPWTFGQGTKVEIK

SEQ ID NO: 49 - protein, 107 aa, Artificial Sequence
  Humanized 1G1 VL L1
EIVLTQSPATLSLSPGERATLSCKASENVGSYVSWYQQKPGQAPRLLIYGASNRYTGIPARFSGSGSGTDFTLTISSLEPEDFAVYYCGQSYSYPLTFGGGTKVEIK

SEQ ID NO: 50 - protein, 107 aa, Artificial Sequence
  Humanized 5G8 VL L1
DIQMTQSPSSLSASVGDRVTITCRASQNVGTNVAWFQQKPGKAPKSLIYSASYRDSGVPSRFSGSGSGTDFTLTISSLQPEDFATYYCQQYNSYPLTFGGGTKVEIK

SEQ ID NO: 51 - protein, 117 aa, Artificial Sequence
  Humanized 1C8 heavy chain variable domain sequence 2 (H6)
EVQLVESGGGLIQPGGSLRLSCAVSGFSLTTYAISWVRQAPGKGLEWLGIIWPGGGTNYADSVKGRFTISRDNSKNTLYLQMNSLRAEDTAVYYCARGAGTWYFDVWGQGTLVTVSS

SEQ ID NO: 52 - protein, 117 aa, Artificial Sequence
  Humanized 1C8 heavy chain variable domain sequence 3 (H7)
EVQLVESGGGLIQPGGSLRLSCAVSGFSLTTYAISWVRQAPGKGLEWLGIIWPGGGTNYADSVKGRFTISKDNSKNTLYLQMNSLRAEDTAVYYCARGAGTWYFDVWGQGTLVTVSS

SEQ ID NO: 53 - protein, 117 aa, Artificial Sequence
  Humanized 1C8 heavy chain variable domain sequence 4 (H8)
EVQLVESGGGLIQPGGSLRISCAVSGFSLTTYAISWVRQAPGKGLEWLGIIWPGGGTNYADSLKGRLTISKDNSKNTVYLQMNSLRTEDTAVYYCARGAGTWYFDVWGQGTLVTVSS

SEQ ID NO: 54 - protein, 107 aa, Artificial Sequence
  Humanized 1C8 light chain variable domain sequence 2 (L2)
DIQMTQSPSSLSASVGDRVTITCSASQGISNYLNWYQQKPGKAPKLLIYYTSSLHSGVPSRFSGSGSGTDYTLTISSLQPEDIATYYCQQYSKFPWTFGQGTKLEIK

SEQ ID NO: 55 - protein, 107 aa, Artificial Sequence
  Humanized 1C8 light chain variable domain sequence 3 (L3)
DIQMTQSPSSLSASVGDRVTITCSASQGISNYLNWYQQKPGKTVKLLIYYTSSLHSGVPSRFSGSGSGTDYTLTISSLQPEDIATYYCQQYSKFPWTFGQGTKLEIK

SEQ ID NO: 56 - protein, 114 aa, Artificial Sequence
  Humanized 1G1 heavy chain variable domain sequence 2 (H2)
EVQLVESGGGLVQPGGSLRLSCAASGFTFSEFGMHWVRQAPGKGLEWVAYISSGGSTIYYADSVKGRFTISRDNAKNSLYLQMNSLRAEDTAVYYCARDWVDYWGQGTLLTVSS

SEQ ID NO: 57 - protein, 114 aa, Artificial Sequence
  Humanized 1G1 heavy chain variable domain sequence 3 (H3)
EVQLVESGGGLVQPGGSLRLSCAASGFTFSEFGMHWVRQAPGKGLEWVAYISSGGSTIYYADSVKGRFTISRDNAKNSLYLQMNSLRAEDTAMYYCARDWVDYWGQGTLLTVSS

SEQ ID NO: 58 - protein, 107 aa, Artificial Sequence
  Humanized 1G1 light chain variable domain sequence 2 (L2)
EIVLTQSPATLSLSPGERATLSCKASENVGSYVSWYQQKPGQAPRLLIYGASNRYTGVPARFSGSGSGTDFTLTISSLEPEDFAVYYCGQSYSYPLTFGGGTKVEIK

SEQ ID NO: 59 - protein, 107 aa, Artificial Sequence
  Humanized 1G1 light chain variable domain sequence 3 (L3)
EIVMTQSPATLSLSPGERVTLSCKASENVGSYVSWYQQKPGQAPRLLIYGASNRYTGVPARFSGSGSGTDFTLTISSVEPEDFAVYYCGQSYSYPLTFGGGTKLELK

SEQ ID NO: 60 - protein, 107 aa, Artificial Sequence
  Humanized 1G1 light chain variable domain sequence 4 (L4)
EIVMTQSPATLSLSPGERVTLSCKASENVGSYVSWYQQKPGQAPRLLIYGASNRYTGVPARFSGSGSGTDFTLTISSVEPEDLAVYYCGQSYSYPLTFGGGTKLELK

SEQ ID NO: 61 - protein, 118 aa, Artificial Sequence
  Humanized 5G8 heavy chain variable domain sequence 2 (H2)
QVQLQESGPGLVKPSETLSLTCTVSGFSLISYGVHWVRQPPGKGLEWLGVIWSGGSTDYNPSLKSRVTISKDTSKNQFSLKLSSVTAADTAVYYCARNPLTATVMDYWGQGTLVTVSS

SEQ ID NO: 62 - protein, 118 aa, Artificial Sequence
  Humanized 5G8 heavy chain variable domain sequence 3 (H3)
QVQLQESGPGLVKPSETLSITCTVSGFSLISYGVHWVRQPPGKGLEWLGVIWSGGSTDYNPSLKSRVTISKDTSKNQVSFKLSSLTAADTAIYYCARNPLTATVMDYWGQGTLVTVSS

SEQ ID NO: 63 - protein, 118 aa, Artificial Sequence
  Humanized 5G8 heavy chain variable domain sequence 4 (H4)
QVQLQESGPGLVKPSETLSITCTVSGFSLISYGVHWVRQPPGKGLEWLGVIWSGGSTDYNPSLKSRVTISKDNSKNQVSFKLSSLTAADTAIYYCARNPLTATVMDYWGQGTLVTVSS

SEQ ID NO: 64 - protein, 107 aa, Artificial Sequence
  Humanized 5G8 light chain variable domain sequence 2 (L2)
DIQMTQSPSSLSASVGDRVTITCRASQNVGTNVAWYQQKPGKAPKALIYSASYRDSGVPSRFSGSGSGTDFTLTISSLQPEDFATYYCQQYNSYPLTFGGGTKVEIK

SEQ ID NO: 65 - protein, 107 aa, Artificial Sequence
  Humanized 5G8 light chain variable domain sequence 3 (L3)
DIQMTQSPSSLSASVGDRVTVTCRASQNVGTNVAWYQQKPGKAPKALIYSASYRDSGVPSRFSGSGSGTDFTLTISSVQPEDFATYYCQQYNSYPLTFGGGTKLEIK

SEQ ID NO: 66 - protein, 107 aa, Artificial Sequence
  Humanized 5G8 light chain variable domain sequence 4 (L4)
DIQMTQSPSSLSASVGDRVTVTCRASQNVGTNVAWYQQKPGKAPKALIYSASYRDSGVPSRFSGSGSGTDFTLTISSVQPEDLATYYCQQYNSYPLTFGGGTKLEIK

SEQ ID NO: 67 - protein, 107 aa, Artificial Sequence [sequence omitted]

SEQ ID NO: 68 - protein, 329 aa, Artificial Sequence
  IgG1 CH1-hinge-CH2-CH3
ASTKGPSVFPLAPSSKSTSGGTAALGCLVKDYFPEPVTVSWNSGALTSGVHTFPAVLQSSGLYSLSSVVTVPSSSLGTQTYICNVNHKPSNTKVDKKVEPKSCDKTHTCPPCPAPEAAGGPSVFLFPPKPKDTLMISRTPEVTCVVVSVSHEDPEVKFNWYVDGVEVHNAKTKPREEQYNSTYRVVSVLTVLHQDWLNGKEYKCKVSNKALPAPIEKTISKAKGQPREPQVYTLPPSRDELTKNQVSLTCLVKGFYPSDIAVEWESNGQPENNYKTTPPVLDSDGSFFLYSKLTVDKSRWQQGNVFSCSVMHEALHNHYTQKSLSLSPG

SEQ ID NO: 69 - protein, 216 aa, Artificial Sequence
  IgG1 Fc sequence 231-446 (EU numbering) without hinge
APEAAGGPSVFLFPPKPKDTLMISRTPEVTCVVVSVSHEDPEVKFNWYVDGVEVHNAKTKPREEQYNSTYRVVSVLTVLHQDWLNGKEYKCKVSNKALPAPIEKTISKAKGQPREPQVYTLPPSRDELTKNQVSLTCLVKGFYPSDIAVEWESNGQPENNYKTTPPVLDSDGSFFLYSKLTVDKSRWQQGNVFSCSVMHEALHNHYTQKSLSLSPG

SEQ ID NO: 70 - protein, 414 aa, Artificial Sequence
  Human 4-1BB_Fc
GLQDPCSNCPAGTFCDNNRNQICSPCPPNSFSSAGGQRTCDICRQCKGVFRTRKECSSTSNAECDCTPGFHCLGAGCSMCEQDCKQGQELTKKGCKDCCFGTFNDQKRGICRPWTNCSLDGKSVLVNGTKERDVVCGPSPADLSPGASSVTPPAPAREPGHSPQDIEGRMDPKSCDKTHTCPPCPAPELLGGPSVFLFPPKPKDTLMISRTPEVTCVVVDVSHEDPEVKFNWYVDGVEVHNAKTKPREEQYNSTYRVVSVLTVLHQDWLNGKEYKCKVSNKALPAPIEKTISKAKGQPREPQVYTLPPSRDELTKNQVSLTCLVKGFYPSDIAVEWESNGQPENNYKTTPPVLDSDGSFFLYSKLTVDKSRWQQGNVFSCSVMHEALHNHYTQKSLSLSPGKGGHHHHHHHHHH

SEQ ID NO: 71 - protein, 116 aa, Artificial Sequence
  MOR7480.1 VH
EVQLVQSGAEVKKPGESLRISCKGSGYSFSTYWISWVRQMPGKGLEWMGKIYPGDSYTNYSPSFQGQVTISADKSISTAYLQWSSLKASDTAMYYCARGYGIFDYWGQGTLVTVSS

SEQ ID NO: 72 - protein, 108 aa, Artificial Sequence
  MOR7480.1 VL
SYELTQPPSVSVSPGQTASITCSGDNIGDQYAHWYQQKPGQSPVLVIYQDKNRPSGIPERFSGSNSGNTATLTISGTQAMDEADYYCATYTGFGSLAVFGGGTKLTVL

SEQ ID NO: 73 - protein, 247 aa, Artificial Sequence
  Anti-HER2 scFv
DIQMTQSPSSLSASVGDRVTITCRASQDVNTAVAWYQQKPGKAPKLLIYSASFLYSGVPSRFSGSRSGTDFTLTISSLQPEDFATYYCQQHYTTPPTFGQGTKVEIKGGSGGGSGGGSGGGSGGGSGEVQLVESGGGLVQPGGSLRLSCAASGFNIKDTYIHWVRQAPGKGLEWVARIYPTNGYTRYADSVKGRFTISADTSKNTAYLQMNSLRAEDTAVYYCSRWGGDGFYAMDYWGQGTLVTVSS

SEQ ID NO: 74 - protein, 240 aa, Artificial Sequence
  MSLN scFv
QVQLVQSGAEVKKPGASVKVSCKASGYSFTGYTMNWVRQAPGQGLEWMGLITPYNGASSYNQKFRGKATMTVDTSTSTVYMELSSLRSEDTAVYYCARGGYDGRGFDYWGQGTLVTVSSGGGGSGGGGSGGGGSDIQMTQSPSSLSASVGDRVTITCSASSSVSYMHWYQQKSGKAPKLLIYDTSKLASGVPSRFSGSGSGTDFTLTISSLQPEDFATYYCQQWSKHPLTFGQGTKLEIK

SEQ ID NO: 75 - protein, 249 aa, Artificial Sequence
  MSLN scFv
QVELVQSGAEVKKPGESLKISCKGSGYSFTSYWIGWVRQAPGKGLEWMGIIDPGDSRTRYSPSFQGQVTISADKSISTAYLQWSSLKASDTAMYYCARGQLYGGTYMDGWGQGTLVTVSSVEGGSGGSGGSGGSGGVDDIALTQPASVSGSPGQSITISCTGTSSDIGGYNSVSWYQQHPGKAPKLMIYGVNNRPSGVSNRFSGSKSGNTASLTISGLQAEDEADYYCSSYDIESATPVFGGGTKLTVL

SEQ ID NO: 76 - protein, 247 aa, Artificial Sequence
  NaPi2b scFv
EVQLVESGGGLVQPGGSLRLSCAASGFSFSDFAMSWVRQAPGKGLEWVATIGRVAFHTYYPDSMKGRFTISRDNSKNTLYLQMNSLRAEDTAVYYCARHRGFDVGHFDFWGQGTLVTVSSGGGGSGGGGSGGGGSDIQMTQSPSSLSASVGDRVTITCRSSETLVHSSGNTYLEWYQQKPGKAPKLLIYRVSNRFSGVPSRFSGSGSGTDFTLTISSLQPEDFATYYCFQGSFNPLTFGQGTKVEIK

SEQ ID NO: 77 - protein, 241 aa, Artificial Sequence
  NaPi2b scFv
DIQMTQSPSSLSASVGDRVTITCSASQDIGNFLNWYQQKPGKTVKVLIYYTSSLYSGVPSRFSGSGSGTDYTLTISSLQPEDFATYYCQQYSKLPLTFGQGTKLELKGGGGSGGGGSGGGGSQVQLVQSGAEVVKPGASVKMSCKASGYTFTGYNIHWVKQAPGQGLEWIGAIYPGNGDTSYKQKFRGRATLTADTSTSTVYMELSSLRSEDSAVYYCARGETARATFAYWGQGTLVTVSS

SEQ ID NO: 78 - protein, 244 aa, Artificial Sequence
  FR scFv
QVQLVQSGAEVVKPGASVKISCKASGYTFTGYFMNWVKQSPGQSLEWIGRIHPYDGDTFYNQKFQGKATLTVDKSSNTAHMELLSLTSEDFAVYYCTRYDGSRAMDYWGQGTTVTVSSGGGGSGGGGSGGGGSDIVLTQSPLSLAVSLGQPAIISCKASQSVSFAGTSLMHWYHQKPGQQPRLLIYRASNLEAGVPDRFSGSGSKTDFTLTISPVEAEDAATYYCQQSREYPYTFGGGTKLEIK

SEQ ID NO: 79 - protein, 255 aa, Artificial Sequence
  human 4-1BB polypeptide (Uniprot Accession No. Q07011)
MGNSCYNIVATLLLVLNFERTRSLQDPCSNCPAGTFCDNNRNQICSPCPPNSFSSAGGQRTCDICRQCKGVFRTRKECSSTSNAECDCTPGFHCLGAGCSMCEQDCKQGQELTKKGCKDCCFGTFNDQKRGICRPWTNCSLDGKSVLVNGTKERDVVCGPSPADLSPGASSVTPPAPAREPGHSPQIISFFLALTSTALLFLLFFLTLRFSVVKRGRKKLLYIFKQPFMRPVQTTQEEDGCSCRFPEEEEGGCEL

SEQ ID NO: 80 - protein, 257 aa, Artificial Sequence
  human FRa polypeptide (UniProt Accession No. P15328)
MAQRMTTQLLLLLVWVAVVGEAQTRIAWARTELLNVCMNAKHHKEKPGPEDKLHEQCRPWRKNACCSTNTSQEAHKDVSYLYRFNWNHCGEMAPACKRHFIQDTCLYECSPNLGPWIQQVDQSWRKERVLNVPLCKEDCEQWWEDCRTSYTCKSNWHKGWNWTSGFNKCAVGAACQPFHFYFPTPTVLCNEIWTHSYKVSNYSRGSGRCIQMWFDPAQGNPNEEVARFYAAAMSGAGPWAAWPFLLSLALMLLWLLS

SEQ ID NO: 81 - protein, 690 aa, Artificial Sequence
  human NaPi2b polypeptide (UniProt Accession No. O95436)
MAPWPELGDAQPNPDKYLEGAAGQQPTAPDKSKETNKTDNTEAPVTKIELLPSYSTATLIDEPTEVDDPWNLPTLQDSGIKWSERDTKGKILCFFQGIGRLILLLGFLYFFVCSLDILSSAFQLVGGKMAGQFFSNSSIMSNPLLGLVIGVLVTVLVQSSSTSTSIVVSMVSSSLLTVRAAIPIIMGANIGTSITNTIVALMQVGDRSEFRRAFAGATVHDFFNWLSVLVLLPVEVATHYLEIITQLIVESFHFKNGEDAPDLLKVITKPFTKLIVQLDKKVISQIAMNDEKAKNKSLVKIWCKTFTNKTQINVTVPSTANCTSPSLCWTDGIQNWTMKNVTYKENIAKCQHIFVNFHLPDLAVGTILLILSLLVLCGCLIMIVKILGSVLKGQVATVIKKTINTDFPFPFAWLTGYLAILVGAGMTFIVQSSSVFTSALTPLIGIGVITIERAYPLTLGSNIGTTTTAILAALASPGNALRSSLQIALCHFFFNISGILLWYPIPFTRLPIRMAKGLGNISAKYRWFAVFYLIIFFFLIPLTVFGLSLAGWRVLVGVGVPVVFIIILVLCLRLLQSRCPRVLPKKLQNWNFLPLWMRSLKPWDAVVSKFTGCFQMRCCCCCRVCCRACCLLCDCPKCCRCSKCCEDLEEAQEGQDVPVKAPETFDNITISREAQGEVPASDSKTECTAL

SEQ ID NO: 82 - protein, 1255 aa, Artificial Sequence [sequence omitted]

SEQ ID NO: 83 - protein, 755 aa, Artificial Sequence
  human LIV-1 polypeptide (UniProt Accession No. Q13433)
MARKLSVILILTFALSVTNPLHELKAAAFPQTTEKISPNWESGINVDLAISTRQYHLQQLFYRYGENNSLSVEGFRKLLQNIGIDKIKRIHIHHDHDHHSDHEHHSDHERHSDHEHHSEHEHHSDHDHHSHHNHAASGKNKRKALCPDHDSDSSGKDPRNSQGKGAHRPEHASGRRNVKDSVSASEVTSTVYNTVSEGTHFLETIETPRPGKLFPKDVSSSTPPSVTSKSRVSRLAGRKTNESVSEPRKGFMYSRNTNENPQECFNASKLLTSHGMGIQVPLNATEFNYLCPAIINQIDARSCLIHTSEKKAEIPPKTYSLQIAWVGGFIAISIISFLSLLGVILVPLMNRVFFKFLLSFLVALAVGTLSGDAFLHLLPHSHASHHHSHSHEEPAMEMKRGPLFSHLSSQNIEESAYFDSTWKGLTALGGLYFMFLVEHVLTLIKQFKDKKKKNQKKPENDDDVEIKKQLSKYESQLSTNEEKVDTDDRTEGYLRADSQEPSHFDSQQPAVLEEEEVMIAHAHPQEVYNEYVPRGCKNKCHSHFHDTLGQSDDLIHHHHDYHHILHHHHHQNHHPHSHSQRYSREELKDAGVATLAWMVIMGDGLHNFSDGLAIGAAFTEGLSSGLSTSVAVFCHELPHELGDFAVLLKAGMTVKQAVLYNALSAMLAYLGMATGIFIGHYAENVSMWIFALTAGLFMYVALVDMVPEMLHNDASDHGCSRWGYFFLQNAGMLLGFGIMLLISIFEHKIVFRINF

SEQ ID NO: 84 - protein, 630 aa, Artificial Sequence
  Mesothelin polypeptide (UniProt Accession No. Q13421)
MALPTARPLLGSCGTPALGSLLFLLFSLGWVQPSRTLAGETGQEAAPLDGVLANPPNISSLSPRQLLGFPCAEVSGLSTERVRELAVALAQKNVKLSTEQLRCLAHRLSEPPEDLDALPLDLLLFLNPDAFSGPQACTRFFSRITKANVDLLPRGAPERQRLLPAALACWGVRGSLLSEADVRALGGLACDLPGRFVAESAEVLLPRLVSCPGPLDQDQQEAARAALQGGGPPYGPPSTWSVSTMDALRGLLPVLGQPIIRSIPQGIVAAWRQRSSRDPSWRQPERTILRPRFRREVEKTACPSGKKAREIDESLIFYKKWELEACVDAALLATQMDRVNAIPFTYEQLDVLKHKLDELYPQGYPESVIQHLGYLFLKMSPEDIRKWNVTSLETLKALLEVNKGHEMSPQAPRRPLPQVATLIDRFVKGRGQLDKDTLDTLTAFYPGYLCSLSPEELSSVPPSSIWAVRPQDLDTCDPRQLDVLYPKARLAFQNMNGSEYFVKIQSFLGGAPTEDLKALSQQNVSMDLATFMKLRTDAVLPLTVAEVQKLLGPHVEGLKAEERHRPVRDWILRQRQDDLDTLGLGLQGGIPNGYLVLDLSMQEALSGTPCLLGPGPVLTVLALLLASTLA

SEQ ID NO: 85 - protein, 217 aa, Artificial Sequence
  Human IgG1 Fc sequence 231-447 (EU numbering)
APELLGGPSVFLFPPKPKDTLMISRTPEVTCVVVDVSHEDPEVKFNWYVDGVEVHNAKTKPREEQYNSTYRVVSVLTVLHQDWLNGKEYKCKVSNKALPAPIEKTISKAKGQPREPQVYTLPPSRDELTKNQVSLTCLVKGFYPSDIAVEWESNGQPENNYKTTPPVLDSDGSFFLYSKLTVDKSRWQQGNVFSCSVMHEALHNHYTQKSLSLSPGK

SEQ ID NO: 86 - protein, 640 aa, Artificial Sequence
  Clone No. 13401
EVQLVESGGGLVQPGGSLRLSCAASGFNIKDTYIHWVRQAPGKGLEWVARIYPTNGYTRYADSVKGRFTISADTSKNTAYLQMNSLRAEDTAVYYCSRWGGDGFYAMDYWGQGTLVTVSSASTKGPSVFPLAPCSRSTSESTAALGCLVKDYFPEPVTVSWNSGALTSGVHTFPAVLQSSGLYSLSSVVTVPSSSLGTKTYTCNVDHKPSNTKVDKRVESKYGPPCPPCPAPEAAGGPSVFLFPPKPKDTLMISRTPEVTCVVVDVSQEDPEVQFNWYVDGVEVHNAKTKPREEQFNSTYRVVSVLTVLHQDWLNGKEYKCKVSNKGLPSSIEKTISKAKGQPREPQVYTLPPSQEEMTKNQVSLTCLVKGFYPSDIAVEWESNGQPENNYKTTPPVLDSDGSFFLYSRLTVDKSRWQEGNVFSCSVMHEALHNHYTQKSLSLSLGKGGGGSGGGGSGGGGSQDSTSDLIPAPPLSKVPLQQNFQDNQFHGKWYVVGQAGNIRLREDKDPIKMMATIYELKEDKSYDVTMVKFDDKKCMYDIWTFVPGSQPGEFTLGKIKSFPGHTSSLVRVVSTNYNQHAMVFFKFVFQNREEFYITLYGRTKELTSELKENFIRFSKSLGLPENHIVFPVPIDQCIDG

SEQ ID NO: 87 - DNA, 1920 bp, Artificial Sequence
  Clone No. 13401
gaggtgcagctggtggagagcggcggcggcctggtgcagcccggcggctctctgcggctgagctgcgccgcctccggctttaacatcaaggacacatacatccactgggtgcggcaggcccccggcaagggcctggagtgggtggccagaatctatcctaccaatggctacacacggtatgccgactccgtgaagggcagattcaccatctctgccgataccagcaagaacacagcctacctgcagatgaacagcctgcgggccgaggatacagccgtgtactattgttctcgctggggcggcgacggcttttacgccatggattattggggccagggcaccctggtgacagtgagctccgctagcacaaaaggaccctctgtctttccactggcaccctgctcacgatcaacctctgaatcaaccgccgctctgggatgtctggtcaaggactacttccccgagcctgtgaccgtgtcttggaacagcggggccctgaccagcggagtgcacacctttcccgccgtgctgcagagctccggcctgtactctctgtctagcgtggtgacagtgccttcctctagcctgggcaccaagacatatacctgcaacgtggaccacaagccaagcaataccaaggtcgacaagcgggtggagtccaagtacggaccaccttgcccaccatgtccggcgccagaggccgccggaggacctagcgtgttcctgtttcctccaaagccaaaggacacactgatgatcagcagaacaccagaggtgacctgcgtggtggtggacgtgtcccaggaggaccccgaggtgcagttcaactggtacgtggatggcgtggaggtgcacaatgccaagaccaagcccagagaggagcagtttaatagcacatacagagtggtgtccgtgctgaccgtgctgcaccaggactggctgaacggcaaggagtataagtgcaaggtgtctaataagggcctgccttcctctatcgagaagacaatcagcaaggccaagggccagcctcgcgaaccacaggtgtacaccctgcccccttctcaggaggagatgacaaagaaccaggtgagcctgacctgtctggtgaagggcttctatccctccgacatcgccgtggagtgggagtctaatggccagcctgagaacaattacaagaccacaccacccgtgctggactccgatggctctttctttctgtattctaggctgacagtggataagagccgctggcaggagggcaacgtgttttcttgcagcgtgatgcacgaggccctgcacaatcactacacccagaagtccctgagcttaagcctgggcaagggaggaggaggcagcggcggaggaggctccggcggcggcggctctcaggactccacctctgatctgatcccagcccctccactgtccaaggtgcccctgcagcagaacttccaggacaatcagtttcacggcaagtggtacgtggtgggccaggccggaaacatccggctgagagaggacaaggaccccatcaagatgatggccacaatctacgagctgaaggaggacaagagctatgatgtgaccatggtgaagttcgacgataagaagtgtatgtacgatatctggacatttgtgccaggctcccagcctggagagttcaccctgggcaagatcaagtcttttcctggccacacaagctccctggtgagggtggtgtccaccaactataatcagcacgccatggtgttctttaagttcgtgtttcagaacagggaggagttctacatcaccctgtatggccgcacaaaggagctgaccagcgagctgaaggagaatttcatccgctttagcaagtccctggggctgccagagaaccacattgtctttccagtgcctattgaccagtgtattgatggg

SEQ ID NO: 88 - protein, 447 aa, Artificial Sequence
  Clone No. 14385
QVQLKQSGPGLVQPSQSLSITCTVSGFSLTSYGVHWVRQSPGKGLEWLGVIWRGGSTDYNAAFISRLSISKDNSKSQVFFKMNSLQADDTAIYYCARENYDYDEFAYWGQGTLVTVSAASTKGPSVFPLAPSSKSTSGGTAALGCLVKDYFPEPVTVSWNSGALTSGVHTFPAVLQSSGLYSLSSVVTVPSSSLGTQTYICNVNHKPSNTKVDKKVEPKSCDKTHTCPPCPAPEAAGGPSVFLFPPKPKDTLMISRTPEVTCVVVSVSHEDPEVKFNWYVDGVEVHNAKTKPREEQYNSTYRVVSVLTVLHQDWLNGKEYKCKVSNKALPAPIEKTISKAKGQPREPQVYTLPPSRDELTKNQVSLTCLVKGFYPSDIAVEWESNGQPENNYKTTPPVLDSDGSFFLYSKLTVDKSRWQQGNVFSCSVMHEALHNHYTQKSLSLSPG

SEQ ID NO: 89 - DNA, 1341 bp, Artificial Sequence
  Clone No. 14385
caggtgcagctgaagcagagcggccccggcctggtgcagcctagccagtccctgtctatcacctgcacagtgtccggcttctctctgaccagctacggagtgcactgggtgcggcagtccccaggcaagggcctggagtggctgggcgtgatctggaggggaggctccacagactataacgccgcctttatctctagactgagcatctccaaggataactctaagagccaggtgttctttaagatgaacagcctgcaggccgacgatacagccatctactattgtgccagggagaattacgactatgatgagtttgcctactggggccagggcaccctggtgacagtgtccgccgctagcacaaagggcccctccgtgtttcctctggccccatcctctaagtccacctctggaggaacagccgccctgggctgtctggtgaaggattacttccctgagccagtgaccgtgtcctggaactctggggccctgaccagcggagtgcacacatttcccgccgtgctgcagagctccggactgtactccctgtctagcgtggtgaccgtgccttcctctagcctgggcacccagacatatatctgcaacgtgaatcacaagccttccaatacaaaggtcgacaagaaggtggagccaaagtcttgtgataagacccacacatgcccaccttgtccggcgccagaggccgccggaggaccaagcgtgttcctgtttccacccaagcccaaggacaccctgatgatctcccggaccccagaggtgacatgcgtggtggtgagcgtgtcccacgaggaccccgaggtgaagtttaactggtacgtggatggcgtggaggtgcacaatgccaagacaaagccccgggaggagcagtacaattctacctatagagtggtgagcgtgctgacagtgctgcaccaggattggctgaacggcaaggagtataagtgtaaggtgagcaataaggccctgccagcccccatcgagaagaccatctccaaggccaagggccagcctcgcgaaccacaggtgtacactctgcctccatctcgggacgagctgactaagaaccaggtcagtctgacctgtctggtgaaaggattctatcccagcgatatcgctgtggagtgggaatccaatggccagcctgagaacaattacaagaccacaccccctgtgctggactctgatggcagtttctttctgtatagtaagctgaccgtcgataaatcacgatggcagcaggggaacgtgttcagctgttcagtgatgcacgaagccctgcacaaccattacacccagaagagcctgagcctgtctcccggc

SEQ ID NO: 90 - protein, 446 aa, Artificial Sequence
  Clone No. 14386
QVQLKESGPGLVAPSQSLSITCTVSGFSLTTYAISWVRQPPGKGLEWLGIIWPGGGTNYNSALKSRLSISKDNSRSQVFLKMNSLQTDDTARYYCARGAGTWYFDVWGAGTTVTVSSASTKGPSVFPLAPSSKSTSGGTAALGCLVKDYFPEPVTVSWNSGALTSGVHTFPAVLQSSGLYSLSSVVTVPSSSLGTQTYICNVNHKPSNTKVDKKVEPKSCDKTHTCPPCPAPEAAGGPSVFLFPPKPKDTLMISRTPEVTCVVVSVSHEDPEVKFNWYVDGVEVHNAKTKPREEQYNSTYRVVSVLTVLHQDWLNGKEYKCKVSNKALPAPIEKTISKAKGQPREPQVYTLPPSRDELTKNQVSLTCLVKGFYPSDIAVEWESNGQPENNYKTTPPVLDSDGSFFLYSKLTVDKSRWQQGNVFSCSVMHEALHNHYTQKSLSLSPG

SEQ ID NO: 91 - DNA, 1338 bp, Artificial Sequence
  Clone No. 14386
caggtgcagctgaaggagtccggaccaggactggtggccccctctcagagcctgtccatcacctgcacagtgagcggcttttccctgaccacatacgcaatctcttgggtgcggcagccacctggcaagggactggagtggctgggaatcatctggccaggaggaggcacaaactataattctgccctgaagagcaggctgtctatcagcaaggacaactcccgctctcaggtgttcctgaagatgaacagcctgcagaccgacgatacagcaaggtactattgtgcccggggggcagggacctggtactttgacgtgtggggggcagggaccacagtgacagtgagctccgctagcacaaagggcccctccgtgtttcctctggccccatcctctaagtccacctctggaggaacagccgccctgggctgtctggtgaaggattacttccctgagccagtgaccgtgtcctggaactctggggccctgaccagcggagtgcacacatttcccgccgtgctgcagagctccggactgtactccctgtctagcgtggtgaccgtgccttcctctagcctgggcacccagacatatatctgcaacgtgaatcacaagccttccaatacaaaggtcgacaagaaggtggagccaaagtcttgtgataagacccacacatgcccaccttgtccggcgccagaggccgccggaggaccaagcgtgttcctgtttccacccaagcccaaggacaccctgatgatctcccggaccccagaggtgacatgcgtggtggtgagcgtgtcccacgaggaccccgaggtgaagtttaactggtacgtggatggcgtggaggtgcacaatgccaagacaaagccccgggaggagcagtacaattctacctatagagtggtgagcgtgctgacagtgctgcaccaggattggctgaacggcaaggagtataagtgtaaggtgagcaataaggccctgccagcccccatcgagaagaccatctccaaggccaagggccagcctcgcgaaccacaggtgtacactctgcctccatctcgggacgagctgactaagaaccaggtcagtctgacctgtctggtgaaaggattctatcccagcgatatcgctgtggagtgggaatccaatggccagcctgagaacaattacaagaccacaccccctgtgctggactctgatggcagtttctttctgtatagtaagctgaccgtcgataaatcacgatggcagcaggggaacgtgttcagctgttcagtgatgcacgaagccctgcacaaccattacacccagaagagcctgagcctgtctcccggc

SEQ ID NO: 92 - protein, 443 aa, Artificial Sequence
  Clone No. 14387
EVQLVESGGGLVKPGGSRKLSCAASGFTFSEFGMHWVRQAPDKGLKWVAYISSGGSTIYYADTVKGRFTISRDNAKNTLFLQMTSLRSEDTAMYYCARDWVDYWGQGTTLTVSSASTKGPSVFPLAPSSKSTSGGTAALGCLVKDYFPEPVTVSWNSGALTSGVHTFPAVLQSSGLYSLSSVVTVPSSSLGTQTYICNVNHKPSNTKVDKKVEPKSCDKTHTCPPCPAPEAAGGPSVFLFPPKPKDTLMISRTPEVTCVVVSVSHEDPEVKFNWYVDGVEVHNAKTKPREEQYNSTYRVVSVLTVLHQDWLNGKEYKCKVSNKALPAPIEKTISKAKGQPREPQVYTLPPSRDELTKNQVSLTCLVKGFYPSDIAVEWESNGQPENNYKTTPPVLDSDGSFFLYSKLTVDKSRWQQGNVFSCSVMHEALHNHYTQKSLSLSPG

SEQ ID NO: 93 - DNA, 1329 bp, Artificial Sequence
  Clone No. 14387
gaggtgcagctggtggagtctggaggaggactggtgaagccaggaggcagcagaaagctgtcctgcgcagcctctggcttcacctttagcgagtttggcatgcactgggtgagacaggcccccgacaagggcctgaagtgggtggcctacatcagctccggcggcagcaccatctactatgccgacacagtgaagggccggttcaccatctccagagataacgccaagaatacactgtttctgcagatgacctccctgaggtctgaggatacagccatgtactattgtgcccgcgactgggtggattattggggccagggcaccacactgaccgtgtctagcgctagcacaaagggcccctccgtgtttcctctggccccatcctctaagtccacctctggaggaacagccgccctgggctgtctggtgaaggattacttccctgagccagtgaccgtgtcctggaactctggggccctgaccagcggagtgcacacatttcccgccgtgctgcagagctccggactgtactccctgtctagcgtggtgaccgtgccttcctctagcctgggcacccagacatatatctgcaacgtgaatcacaagccttccaatacaaaggtcgacaagaaggtggagccaaagtcttgtgataagacccacacatgcccaccttgtccggcgccagaggccgccggaggaccaagcgtgttcctgtttccacccaagcccaaggacaccctgatgatctcccggaccccagaggtgacatgcgtggtggtgagcgtgtcccacgaggaccccgaggtgaagtttaactggtacgtggatggcgtggaggtgcacaatgccaagacaaagccccgggaggagcagtacaattctacctatagagtggtgagcgtgctgacagtgctgcaccaggattggctgaacggcaaggagtataagtgtaaggtgagcaataaggccctgccagcccccatcgagaagaccatctccaaggccaagggccagcctcgcgaaccacaggtgtacactctgcctccatctcgggacgagctgactaagaaccaggtcagtctgacctgtctggtgaaaggattctatcccagcgatatcgctgtggagtgggaatccaatggccagcctgagaacaattacaagaccacaccccctgtgctggactctgatggcagtttctttctgtatagtaagctgaccgtcgataaatcacgatggcagcaggggaacgtgttcagctgttcagtgatgcacgaagccctgcacaaccattacacccagaagagcctgagcctgtctcccggc

SEQ ID NO: 94 - protein, 448 aa, Artificial Sequence
  Clone No. 14388
EVQLQQSGPELVKPGASVKMSCKASGYTFTSYVMHWVKQKPGQGLEWIGYINPYNDGTKYNEKFKGKATLTSDKSSSTAYMELSSLTSEDSAVYYCARLGSRGTWFAYWGQGTLVTVSAASTKGPSVFPLAPSSKSTSGGTAALGCLVKDYFPEPVTVSWNSGALTSGVHTFPAVLQSSGLYSLSSVVTVPSSSLGTQTYICNVNHKPSNTKVDKKVEPKSCDKTHTCPPCPAPEAAGGPSVFLFPPKPKDTLMISRTPEVTCVVVSVSHEDPEVKFNWYVDGVEVHNAKTKPREEQYNSTYRVVSVLTVLHQDWLNGKEYKCKVSNKALPAPIEKTISKAKGQPREPQVYTLPPSRDELTKNQVSLTCLVKGFYPSDIAVEWESNGQPENNYKTTPPVLDSDGSFFLYSKLTVDKSRWQQGNVFSCSVMHEALHNHYTQKSLSLSPG

SEQ ID NO: 95 - DNA, 1344 bp, Artificial Sequence
  Clone No. 14388
gaggtgcagctgcagcagagcggaccagagctggtgaagcctggggccagcgtgaagatgtcttgcaaggccagcggctacaccttcacatcctatgtgatgcactgggtgaagcagaagccaggccagggcctggagtggatcggctacatcaacccctataatgacggcaccaagtacaacgagaagtttaagggcaaggccaccctgacatctgataagagctcctctaccgcctatatggagctgagctccctgacatctgaggacagcgccgtgtactattgtgcccggctgggctccagaggcacatggtttgcctactggggccagggcaccctggtgacagtgtctgccgctagcacaaagggcccctccgtgtttcctctggccccatcctctaagtccacctctggaggaacagccgccctgggctgtctggtgaaggattacttccctgagccagtgaccgtgtcctggaactctggggccctgaccagcggagtgcacacatttcccgccgtgctgcagagctccggactgtactccctgtctagcgtggtgaccgtgccttcctctagcctgggcacccagacatatatctgcaacgtgaatcacaagccttccaatacaaaggtcgacaagaaggtggagccaaagtcttgtgataagacccacacatgcccaccttgtccggcgccagaggccgccggaggaccaagcgtgttcctgtttccacccaagcccaaggacaccctgatgatctcccggaccccagaggtgacatgcgtggtggtgagcgtgtcccacgaggaccccgaggtgaagtttaactggtacgtggatggcgtggaggtgcacaatgccaagacaaagccccgggaggagcagtacaattctacctatagagtggtgagcgtgctgacagtgctgcaccaggattggctgaacggcaaggagtataagtgtaaggtgagcaataaggccctgccagcccccatcgagaagaccatctccaaggccaagggccagcctcgcgaaccacaggtgtacactctgcctccatctcgggacgagctgactaagaaccaggtcagtctgacctgtctggtgaaaggattctatcccagcgatatcgctgtggagtgggaatccaatggccagcctgagaacaattacaagaccacaccccctgtgctggactctgatggcagtttctttctgtatagtaagctgaccgtcgataaatcacgatggcagcaggggaacgtgttcagctgttcagtgatgcacgaagccctgcacaaccattacacccagaagagcctgagcctgtctcccggc

SEQ ID NO: 96 - protein, 447 aa, Artificial Sequence
  Clone No. 14389
QVQLKQSGPGLVQPSQSLSITCTVSGFSLTSYGVHWVRQSPGKGLEWLGVIWSGGSTDYNAAFISRLSISKDNSKSQVFFKMNSLQADDTAIYYCARNPLTATVMDYWGQGTSVTVSSASTKGPSVFPLAPSSKSTSGGTAALGCLVKDYFPEPVTVSWNSGALTSGVHTFPAVLQSSGLYSLSSVVTVPSSSLGTQTYICNVNHKPSNTKVDKKVEPKSCDKTHTCPPCPAPEAAGGPSVFLFPPKPKDTLMISRTPEVTCVVVSVSHEDPEVKFNWYVDGVEVHNAKTKPREEQYNSTYRVVSVLTVLHQDWLNGKEYKCKVSNKALPAPIEKTISKAKGQPREPQVYTLPPSRDELTKNQVSLTCLVKGFYPSDIAVEWESNGQPENNYKTTPPVLDSDGSFFLYSKLTVDKSRWQQGNVFSCSVMHEALHNHYTQKSLSLSPG

SEQ ID NO: 97 - DNA, 1341 bp, Artificial Sequence
  Clone No. 14389
caggtgcagctgaagcagtccggaccaggactggtgcagccttctcagagcctgtccatcacctgcacagtgagcggcttctccctgacctcttacggcgtgcactgggtgaggcagtctcctggcaagggactggagtggctgggcgtgatctggagcggaggctccacagactataacgccgcctttatctctcgcctgtctatcagcaaggataactccaagtctcaggtgttctttaagatgaatagcctgcaggccgacgatacagccatctactattgtgcccggaatcccctgaccgccacagtgatggactactggggccagggcaccagcgtgacagtgagctccgctagcacaaagggcccctccgtgtttcctctggccccatcctctaagtccacctctggaggaacagccgccctgggctgtctggtgaaggattacttccctgagccagtgaccgtgtcctggaactctggggccctgaccagcggagtgcacacatttcccgccgtgctgcagagctccggactgtactccctgtctagcgtggtgaccgtgccttcctctagcctgggcacccagacatatatctgcaacgtgaatcacaagccttccaatacaaaggtcgacaagaaggtggagccaaagtcttgtgataagacccacacatgcccaccttgtccggcgccagaggccgccggaggaccaagcgtgttcctgtttccacccaagcccaaggacaccctgatgatctcccggaccccagaggtgacatgcgtggtggtgagcgtgtcccacgaggaccccgaggtgaagtttaactggtacgtggatggcgtggaggtgcacaatgccaagacaaagccccgggaggagcagtacaattctacctatagagtggtgagcgtgctgacagtgctgcaccaggattggctgaacggcaaggagtataagtgtaaggtgagcaataaggccctgccagcccccatcgagaagaccatctccaaggccaagggccagcctcgcgaaccacaggtgtacactctgcctccatctcgggacgagctgactaagaaccaggtcagtctgacctgtctggtgaaaggattctatcccagcgatatcgctgtggagtgggaatccaatggccagcctgagaacaattacaagaccacaccccctgtgctggactctgatggcagtttctttctgtatagtaagctgaccgtcgataaatcacgatggcagcaggggaacgtgttcagctgttcagtgatgcacgaagccctgcacaaccattacacccagaagagcctgagcctgtctcccggc

SEQ ID NO: 98 - protein, 449 aa, Artificial Sequence
  Clone No. 14390
QVQLQQPGAELVRPGASVKLSCKASGYPFTSYWMSWVKQRPEQGLEWIGRIDPYDSETHYNQKFKDKAILTVDKSSSTAYMQLSSLTSEDSAVYYCARTYYGNYDAMDYWGQGTSVTVSSASTKGPSVFPLAPSSKSTSGGTAALGCLVKDYFPEPVTVSWNSGALTSGVHTFPAVLQSSGLYSLSSVVTVPSSSLGTQTYICNVNHKPSNTKVDKKVEPKSCDKTHTCPPCPAPEAAGGPSVFLFPPKPKDTLMISRTPEVTCVVVSVSHEDPEVKFNWYVDGVEVHNAKTKPREEQYNSTYRVVSVLTVLHQDWLNGKEYKCKVSNKALPAPIEKTISKAKGQPREPQVYTLPPSRDELTKNQVSLTCLVKGFYPSDIAVEWESNGQPENNYKTTPPVLDSDGSFFLYSKLTVDKSRWQQGNVFSCSVMHEALHNHYTQKSLSLSPG

SEQ ID NO: 99 - DNA, 1347 bp, Artificial Sequence
  Clone No. 14390
caggtgcagctgcagcagccaggagccgagctggtgcgccctggggccagcgtgaagctgtcctgcaaggcctctggctaccccttcaccagctattggatgtcctgggtgaagcagcggccagagcagggactggagtggatcggcagaatcgacccctacgattctgagacacactataaccagaagtttaaggacaaggccatcctgaccgtggataagagctcctctacagcctacatgcagctgagctccctgacctccgaggactctgccgtgtactattgtgccaggacatactatggcaattacgacgccatggattattggggccagggcacctccgtgacagtgtctagcgctagcacaaagggcccctccgtgtttcctctggccccatcctctaagtccacctctggaggaacagccgccctgggctgtctggtgaaggattacttccctgagccagtgaccgtgtcctggaactctggggccctgaccagcggagtgcacacatttcccgccgtgctgcagagctccggactgtactccctgtctagcgtggtgaccgtgccttcctctagcctgggcacccagacatatatctgcaacgtgaatcacaagccttccaatacaaaggtcgacaagaaggtggagccaaagtcttgtgataagacccacacatgcccaccttgtccggcgccagaggccgccggaggaccaagcgtgttcctgtttccacccaagcccaaggacaccctgatgatctcccggaccccagaggtgacatgcgtggtggtgagcgtgtcccacgaggaccccgaggtgaagtttaactggtacgtggatggcgtggaggtgcacaatgccaagacaaagccccgggaggagcagtacaattctacctatagagtggtgagcgtgctgacagtgctgcaccaggattggctgaacggcaaggagtataagtgtaaggtgagcaataaggccctgccagcccccatcgagaagaccatctccaaggccaagggccagcctcgcgaaccacaggtgtacactctgcctccatctcgggacgagctgactaagaaccaggtcagtctgacctgtctggtgaaaggattctatcccagcgatatcgctgtggagtgggaatccaatggccagcctgagaacaattacaagaccacaccccctgtgctggactctgatggcagtttctttctgtatagtaagctgaccgtcgataaatcacgatggcagcaggggaacgtgttcagctgttcagtgatgcacgaagccctgcacaaccattacacccagaagagcctgagcctgtctcccggc

SEQ ID NO: 100 - protein, 450 aa, Artificial Sequence
  Clone No. 14391
QVQLQQPGAELVRPGASVKLSCKASGYTFTSYWINWVKQRPGQGLEWIGNIYPSDNYTNYNQKFKDKATLTVDKSSSTAYMQLSSPTSEDSAVYYCTRGGGIYYENYFDYWGQGTTLTVSSASTKGPSVFPLAPSSKSTSGGTAALGCLVKDYFPEPVTVSWNSGALTSGVHTFPAVLQSSGLYSLSSVVTVPSSSLGTQTYICNVNHKPSNTKVDKKVEPKSCDKTHTCPPCPAPEAAGGPSVFLFPPKPKDTLMISRTPEVTCVVVSVSHEDPEVKFNWYVDGVEVHNAKTKPREEQYNSTYRVVSVLTVLHQDWLNGKEYKCKVSNKALPAPIEKTISKAKGQPREPQVYTLPPSRDELTKNQVSLTCLVKGFYPSDIAVEWESNGQPENNYKTTPPVLDSDGSFFLYSKLTVDKSRWQQGNVFSCSVMHEALHNHYTQKSLSLSPG

SEQ ID NO: 101 - DNA, 1350 bp, Artificial Sequence
  Clone No. 14391
caggtgcagctgcagcagccaggagccgagctggtgagacctggggccagcgtgaagctgtcctgcaaggcctctggctacaccttcacaagctattggatcaactgggtgaagcagaggccaggacagggactggagtggatcggcaacatctacccctccgacaactacacaaactacaaccagaagtttaaggacaaggccaccctgacagtggataagagctcctctaccgcctatatgcagctgagctcccccacatccgaggactctgccgtgtactattgtacccggggcggcggcatctactacgagaactacttcgattactggggccagggcaccacactgacagtgtctagcgctagcacaaagggcccctccgtgtttcctctggccccatcctctaagtccacctctggaggaacagccgccctgggctgtctggtgaaggattacttccctgagccagtgaccgtgtcctggaactctggggccctgaccagcggagtgcacacatttcccgccgtgctgcagagctccggactgtactccctgtctagcgtggtgaccgtgccttcctctagcctgggcacccagacatatatctgcaacgtgaatcacaagccttccaatacaaaggtcgacaagaaggtggagccaaagtcttgtgataagacccacacatgcccaccttgtccggcgccagaggccgccggaggaccaagcgtgttcctgtttccacccaagcccaaggacaccctgatgatctcccggaccccagaggtgacatgcgtggtggtgagcgtgtcccacgaggaccccgaggtgaagtttaactggtacgtggatggcgtggaggtgcacaatgccaagacaaagccccgggaggagcagtacaattctacctatagagtggtgagcgtgctgacagtgctgcaccaggattggctgaacggcaaggagtataagtgtaaggtgagcaataaggccctgccagcccccatcgagaagaccatctccaaggccaagggccagcctcgcgaaccacaggtgtacactctgcctccatctcgggacgagctgactaagaaccaggtcagtctgacctgtctggtgaaaggattctatcccagcgatatcgctgtggagtgggaatccaatggccagcctgagaacaattacaagaccacaccccctgtgctggactctgatggcagtttctttctgtatagtaagctgaccgtcgataaatcacgatggcagcaggggaacgtgttcagctgttcagtgatgcacgaagccctgcacaaccattacacccagaagagcctgagcctgtctcccggc

SEQ ID NO: 102 - protein, 453 aa, Artificial Sequence
  Clone No. 14392
QVHLQQSGSELRIPGSSVKLSCKDFDSEVFPIAYMSWVRQKPGHGFEWIGDILPSIGRTIYGEKFEDKATLDADTVSNTAYLDLNSLTSEDSAIYYCSRGDYYYGSREYAMDYWGQGTSVTVSSASTKGPSVFPLAPSSKSTSGGTAALGCLVKDYFPEPVTVSWNSGALTSGVHTFPAVLQSSGLYSLSSVVTVPSSSLGTQTYICNVNHKPSNTKVDKKVEPKSCDKTHTCPPCPAPEAAGGPSVFLFPPKPKDTLMISRTPEVTCVVVSVSHEDPEVKFNWYVDGVEVHNAKTKPREEQYNSTYRVVSVLTVLHQDWLNGKEYKCKVSNKALPAPIEKTISKAKGQPREPQVYTLPPSRDELTKNQVSLTCLVKGFYPSDIAVEWESNGQPENNYKTTPPVLDSDGSFFLYSKLTVDKSRWQQGNVFSCSVMHEALHNHYTQKSLSLSPG

SEQ ID NO: 103 - DNA, 1359 bp, Artificial Sequence
  Clone No. 14392
caggtgcacctgcagcagtccggctctgagctgcgcatccctggcagctccgtgaagctgagctgcaaggacttcgattccgaggtgtttcccatcgcctatatgtcctgggtgcggcagaagcctggacacggattcgagtggatcggcgacatcctgccctctatcggcaggaccatctatggcgagaagtttgaggataaggccacactggacgccgataccgtgtccaacacagcctacctggacctgaatagcctgacatccgaggattctgccatctactattgttctcggggcgactactattacggcagcagagagtatgccatggattactggggccagggcaccagcgtgacagtgtctagcgctagcacaaagggcccctccgtgtttcctctggccccatcctctaagtccacctctggaggaacagccgccctgggctgtctggtgaaggattacttccctgagccagtgaccgtgtcctggaactctggggccctgaccagcggagtgcacacatttcccgccgtgctgcagagctccggactgtactccctgtctagcgtggtgaccgtgccttcctctagcctgggcacccagacatatatctgcaacgtgaatcacaagccttccaatacaaaggtcgacaagaaggtggagccaaagtcttgtgataagacccacacatgcccaccttgtccggcgccagaggccgccggaggaccaagcgtgttcctgtttccacccaagcccaaggacaccctgatgatctcccggaccccagaggtgacatgcgtggtggtgagcgtgtcccacgaggaccccgaggtgaagtttaactggtacgtggatggcgtggaggtgcacaatgccaagacaaagccccgggaggagcagtacaattctacctatagagtggtgagcgtgctgacagtgctgcaccaggattggctgaacggcaaggagtataagtgtaaggtgagcaataaggccctgccagcccccatcgagaagaccatctccaaggccaagggccagcctcgcgaaccacaggtgtacactctgcctccatctcgggacgagctgactaagaaccaggtcagtctgacctgtctggtgaaaggattctatcccagcgatatcgctgtggagtgggaatccaatggccagcctgagaacaattacaagaccacaccccctgtgctggactctgatggcagtttctttctgtatagtaagctgaccgtcgataaatcacgatggcagcaggggaacgtgttcagctgttcagtgatgcacgaagccctgcacaaccattacacccagaagagcctgagcctgtctcccggc

SEQ ID NO: 104 - protein, 443 aa, Artificial Sequence
  Clone No. 14393
QVQLQESGGGLVKPGGSRKLSCAASGFTFSEFGMHWVRQAPDKGLEWVAYISSGSSTIYYADTVKGRFTISRDNAKNTLFLQMTSLRSEDTAMYYCARDWVDYWGQGTALTVSSASTKGPSVFPLAPSSKSTSGGTAALGCLVKDYFPEPVTVSWNSGALTSGVHTFPAVLQSSGLYSLSSVVTVPSSSLGTQTYICNVNHKPSNTKVDKKVEPKSCDKTHTCPPCPAPEAAGGPSVFLFPPKPKDTLMISRTPEVTCVVVSVSHEDPEVKFNWYVDGVEVHNAKTKPREEQYNSTYRVVSVLTVLHQDWLNGKEYKCKVSNKALPAPIEKTISKAKGQPREPQVYTLPPSRDELTKNQVSLTCLVKGFYPSDIAVEWESNGQPENNYKTTPPVLDSDGSFFLYSKLTVDKSRWQQGNVFSCSVMHEALHNHYTQKSLSLSPG

SEQ ID NO: 105 - DNA, 1329 bp, Artificial Sequence
  Clone No. 14393
caggtgcagctgcaggagtctggaggaggactggtgaagccaggaggctctagaaagctgagctgcgccgcctccggcttcacctttagcgagtttggcatgcactgggtgagacaggcccccgacaagggactggagtgggtggcctacatcagctccggctctagcaccatctactatgccgacacagtgaagggccggttcaccatctccagagataacgccaagaatacactgtttctgcagatgaccagcctgaggtccgaggatacagccatgtactattgtgcccgcgactgggtggattattggggacagggaaccgccctgacagtgtcctctgctagcacaaagggcccctccgtgtttcctctggccccatcctctaagtccacctctggaggaacagccgccctgggctgtctggtgaaggattacttccctgagccagtgaccgtgtcctggaactctggggccctgaccagcggagtgcacacatttcccgccgtgctgcagagctccggactgtactccctgtctagcgtggtgaccgtgccttcctctagcctgggcacccagacatatatctgcaacgtgaatcacaagccttccaatacaaaggtcgacaagaaggtggagccaaagtcttgtgataagacccacacatgcccaccttgtccggcgccagaggccgccggaggaccaagcgtgttcctgtttccacccaagcccaaggacaccctgatgatctcccggaccccagaggtgacatgcgtggtggtgagcgtgtcccacgaggaccccgaggtgaagtttaactggtacgtggatggcgtggaggtgcacaatgccaagacaaagccccgggaggagcagtacaattctacctatagagtggtgagcgtgctgacagtgctgcaccaggattggctgaacggcaaggagtataagtgtaaggtgagcaataaggccctgccagcccccatcgagaagaccatctccaaggccaagggccagcctcgcgaaccacaggtgtacactctgcctccatctcgggacgagctgactaagaaccaggtcagtctgacctgtctggtgaaaggattctatcccagcgatatcgctgtggagtgggaatccaatggccagcctgagaacaattacaagaccacaccccctgtgctggactctgatggcagtttctttctgtatagtaagctgaccgtcgataaatcacgatggcagcaggggaacgtgttcagctgttcagtgatgcacgaagccctgcacaaccattacacccagaagagcctgagcctgtctcccggc

SEQ ID NO: 106 - protein, 445 aa, Artificial Sequence
  Clone No. 14394
QVQLKQSGPGLVQPSQSLSITCTVSGFSLTSYGVHWVRQSPGKGLEWLGVIWSGGSTDYNGAFISRLSISKDNSKSQVFFKMNSLQADDTAMYFCARDRGGGFDYWGQGTTLTVSSASTKGPSVFPLAPSSKSTSGGTAALGCLVKDYFPEPVTVSWNSGALTSGVHTFPAVLQSSGLYSLSSVVTVPSSSLGTQTYICNVNHKPSNTKVDKKVEPKSCDKTHTCPPCPAPEAAGGPSVFLFPPKPKDTLMISRTPEVTCVVVSVSHEDPEVKFNWYVDGVEVHNAKTKPREEQYNSTYRVVSVLTVLHQDWLNGKEYKCKVSNKALPAPIEKTISKAKGQPREPQVYTLPPSRDELTKNQVSLTCLVKGFYPSDIAVEWESNGQPENNYKTTPPVLDSDGSFFLYSKLTVDKSRWQQGNVFSCSVMHEALHNHYTQKSLSLSPG

SEQ ID NO: 107 - DNA, 1335 bp, Artificial Sequence
  Clone No. 14394
caggtgcagctgaagcagtccggccccggcctggtgcagccttctcagagcctgtccatcacctgcacagtgagcggcttctccctgacctcttacggagtgcactgggtgcggcagtctccaggcaagggactggagtggctgggcgtgatctggagcggaggctccacagactataacggggccttcatctctaggctgtctatcagcaaggataactccaagtctcaggtgttctttaagatgaatagcctgcaggccgacgataccgccatgtacttctgtgcccgggacagaggcggcggctttgattattggggccagggcaccacactgacagtgagctccgctagcacaaagggcccctccgtgtttcctctggccccatcctctaagtccacctctggaggaacagccgccctgggctgtctggtgaaggattacttccctgagccagtgaccgtgtcctggaactctggggccctgaccagcggagtgcacacatttcccgccgtgctgcagagctccggactgtactccctgtctagcgtggtgaccgtgccttcctctagcctgggcacccagacatatatctgcaacgtgaatcacaagccttccaatacaaaggtcgacaagaaggtggagccaaagtcttgtgataagacccacacatgcccaccttgtccggcgccagaggccgccggaggaccaagcgtgttcctgtttccacccaagcccaaggacaccctgatgatctcccggaccccagaggtgacatgcgtggtggtgagcgtgtcccacgaggaccccgaggtgaagtttaactggtacgtggatggcgtggaggtgcacaatgccaagacaaagccccgggaggagcagtacaattctacctatagagtggtgagcgtgctgacagtgctgcaccaggattggctgaacggcaaggagtataagtgtaaggtgagcaataaggccctgccagcccccatcgagaagaccatctccaaggccaagggccagcctcgcgaaccacaggtgtacactctgcctccatctcgggacgagctgactaagaaccaggtcagtctgacctgtctggtgaaaggattctatcccagcgatatcgctgtggagtgggaatccaatggccagcctgagaacaattacaagaccacaccccctgtgctggactctgatggcagtttctttctgtatagtaagctgaccgtcgataaatcacgatggcagcaggggaacgtgttcagctgttcagtgatgcacgaagccctgcacaaccattacacccagaagagcctgagcctgtctcccggc

SEQ ID NO: 108 - protein, 445 aa, Artificial Sequence
  Clone No. 4667
EVQLVQSGAEVKKPGESLRISCKGSGYSFSTYWISWVRQMPGKGLEWMGKIYPGDSYTNYSPSFQGQVTISADKSISTAYLQWSSLKASDTAMYYCARGYGIFDYWGQGTLVTVSSASTKGPSVFPLAPCSRSTSESTAALGCLVKDYFPEPVTVSWNSGALTSGVHTFPAVLQSSGLYSLSSVVTVPSSNFGTQTYTCNVDHKPSNTKVDKTVEPKSCDKTHTCPPCPAPELLGGPSVFLFPPKPKDTLMISRTPEVTCVVVDVSHEDPEVKFNWYVDGVEVHNAKTKPREEQYNSTYRVVSVLTVLHQDWLNGKEYKCKVSNKALPAPIEKTISKAKGQPREPQVYVLPPSRDELTKNQVSLLCLVKGFYPSDIAVEWESNGQPENNYLTWPPVLDSDGSFFLYSKLTVDKSRWQQGNVFSCSVMHEALHNHYTQKSLSLSPG

SEQ ID NO: 109 - DNA, 1335 bp, Artificial Sequence
  Clone No. 4667
gaagtccagctggtccagtccggagccgaggtgaagaaacccggcgaatcactgcgaatcagctgcaagggcagcggctacagcttctccacttattggattagctgggtgcggcagatgcctgggaagggactggagtggatggggaaaatctaccccggagatagctacaccaactattctcctagttttcagggccaagtgactatctccgccgacaagtcaattagcaccgcttatctgcagtggagctccctgaaagctagcgatacagcaatgtactattgtgccagaggctacgggattttcgactattggggacagggcactctggtcaccgtgtctagtgcttctactaaggggcccagtgtgtttccactggcaccctgctccaggtctacaagtgaatcaactgccgctctgggatgtctggtgaaagattacttcccagagcccgtcacagtgagctggaactccggcgcactgacttctggggtccacacctttcctgccgtgctgcagtcaagcggcctgtacagcctgtcctctgtggtcaccgtgccaagttcaaatttcgggacccagacatatacttgcaacgtggaccacaagccttctaatacaaaggtcgataaaactgtggaaccaaagagttgtgacaaaacccatacatgccccccttgtcctgcaccagagctgctgggaggaccatccgtgttcctgtttccacccaagcccaaagatacactgatgatcagccgcaccccagaagtcacatgcgtggtcgtggacgtgtcccacgaggaccccgaagtcaagtttaactggtacgtggacggcgtcgaggtgcataatgctaagaccaaaccacgggaggaacagtacaattcaacctatagagtcgtgagcgtcctgacagtgctgcaccaggattggctgaacggcaaagagtataagtgcaaagtgtctaataaggcactgcccgcccctatcgagaaaaccattagcaaggccaaagggcagcctagggaaccacaggtctacgtgctgcctccaagccgcgatgagctgacaaagaaccaggtctccctgctgtgtctggtgaaagggttctatcccagtgacattgctgtggagtgggaatcaaatggacagcctgaaaacaattacctgacatggccccctgtgctggactctgatggaagtttctttctgtattccaagctgactgtggacaaatctcgatggcagcagggcaacgtctttagctgttccgtgatgcatgaggccctgcacaatcattacacccagaagtctctgagtctgtcacctggc

SEQ ID NO: 110 - protein, 446 aa, Artificial Sequence
  Clone No. 14396
QVQLKESGPGLVAPSQSLSITCTVSGFSLTSYAINWVRQPPGKGLEWLGVLWPGGGTNYNSALKSRLSISKDNSKSQVFLKMNSLQTDDTARYYCARGSGTWYFDVWGAGTTVTVSSASTKGPSVFPLAPSSKSTSGGTAALGCLVKDYFPEPVTVSWNSGALTSGVHTFPAVLQSSGLYSLSSVVTVPSSSLGTQTYICNVNHKPSNTKVDKKVEPKSCDKTHTCPPCPAPEAAGGPSVFLFPPKPKDTLMISRTPEVTCVVVSVSHEDPEVKFNWYVDGVEVHNAKTKPREEQYNSTYRVVSVLTVLHQDWLNGKEYKCKVSNKALPAPIEKTISKAKGQPREPQVYTLPPSRDELTKNQVSLTCLVKGFYPSDIAVEWESNGQPENNYKTTPPVLDSDGSFFLYSKLTVDKSRWQQGNVFSCSVMHEALHNHYTQKSLSLSPG

SEQ ID NO: 111 - DNA, 1338 bp, Artificial Sequence
  Clone No. 14396
caggtgcagctgaaggagagcggaccaggactggtggccccctctcagagcctgtccatcacctgcacagtgagcggcttttccctgacctcttacgccatcaactgggtgcggcagccacctggcaagggactggagtggctgggcgtgctgtggccaggaggaggcacaaactataatagcgccctgaagtccaggctgtctatcagcaaggacaactccaagtctcaggtgttcctgaagatgaacagcctgcagaccgacgatacagcccggtactattgtgccagaggctccggcacctggtactttgacgtgtggggggcagggaccacagtgacagtgagctccgctagcacaaagggcccctccgtgtttcctctggccccatcctctaagtccacctctggaggaacagccgccctgggctgtctggtgaaggattacttccctgagccagtgaccgtgtcctggaactctggggccctgaccagcggagtgcacacatttcccgccgtgctgcagagctccggactgtactccctgtctagcgtggtgaccgtgccttcctctagcctgggcacccagacatatatctgcaacgtgaatcacaagccttccaatacaaaggtcgacaagaaggtggagccaaagtcttgtgataagacccacacatgcccaccttgtccggcgccagaggccgccggaggaccaagcgtgttcctgtttccacccaagcccaaggacaccctgatgatctcccggaccccagaggtgacatgcgtggtggtgagcgtgtcccacgaggaccccgaggtgaagtttaactggtacgtggatggcgtggaggtgcacaatgccaagacaaagccccgggaggagcagtacaattctacctatagagtggtgagcgtgctgacagtgctgcaccaggattggctgaacggcaaggagtataagtgtaaggtgagcaataaggccctgccagcccccatcgagaagaccatctccaaggccaagggccagcctcgcgaaccacaggtgtacactctgcctccatctcgggacgagctgactaagaaccaggtcagtctgacctgtctggtgaaaggattctatcccagcgatatcgctgtggagtgggaatccaatggccagcctgagaacaattacaagaccacaccccctgtgctggactctgatggcagtttctttctgtatagtaagctgaccgtcgataaatcacgatggcagcaggggaacgtgttcagctgttcagtgatgcacgaagccctgcacaaccattacacccagaagagcctgagcctgtctcccggc

SEQ ID NO: 112 - protein, 445 aa, Artificial Sequence
  Clone No. 14397
QVQLQQPGAELVKPGASVMLSCKASGYTFTSYWMHWVKQRPGQGLEWIGEINLRNGGTNYYEKFKTRATLTVDKSSSTAYMQLSSLTSEDSAVYYCTILTSAPSYWGQGTLVTVSAASTKGPSVFPLAPSSKSTSGGTAALGCLVKDYFPEPVTVSWNSGALTSGVHTFPAVLQSSGLYSLSSVVTVPSSSLGTQTYICNVNHKPSNTKVDKKVEPKSCDKTHTCPPCPAPEAAGGPSVFLFPPKPKDTLMISRTPEVTCVVVSVSHEDPEVKFNWYVDGVEVHNAKTKPREEQYNSTYRVVSVLTVLHQDWLNGKEYKCKVSNKALPAPIEKTISKAKGQPREPQVYTLPPSRDELTKNQVSLTCLVKGFYPSDIAVEWESNGQPENNYKTTPPVLDSDGSFFLYSKLTVDKSRWQQGNVFSCSVMHEALHNHYTQKSLSLSPG

SEQ ID NO: 113 - DNA, 1335 bp, Artificial Sequence
  Clone No. 14397
caggtgcagctgcagcagccaggagccgagctggtgaagcctggggccagcgtgatgctgtcctgcaaggcctctggctacaccttcacaagctattggatgcactgggtgaagcagcggcctggacagggactggagtggatcggcgagatcaacctgcggaatggcggcaccaactactatgagaagtttaagacaagagccaccctgacagtggacaagagctcctctaccgcctacatgcagctgagctccctgacatctgaggatagcgccgtgtactattgtaccatcctgacatccgccccctcttattggggacagggcaccctggtgacagtgtccgccgctagcacaaagggcccctccgtgtttcctctggccccatcctctaagtccacctctggaggaacagccgccctgggctgtctggtgaaggattacttccctgagccagtgaccgtgtcctggaactctggggccctgaccagcggagtgcacacatttcccgccgtgctgcagagctccggactgtactccctgtctagcgtggtgaccgtgccttcctctagcctgggcacccagacatatatctgcaacgtgaatcacaagccttccaatacaaaggtcgacaagaaggtggagccaaagtcttgtgataagacccacacatgcccaccttgtccggcgccagaggccgccggaggaccaagcgtgttcctgtttccacccaagcccaaggacaccctgatgatctcccggaccccagaggtgacatgcgtggtggtgagcgtgtcccacgaggaccccgaggtgaagtttaactggtacgtggatggcgtggaggtgcacaatgccaagacaaagccccgggaggagcagtacaattctacctatagagtggtgagcgtgctgacagtgctgcaccaggattggctgaacggcaaggagtataagtgtaaggtgagcaataaggccctgccagcccccatcgagaagaccatctccaaggccaagggccagcctcgcgaaccacaggtgtacactctgcctccatctcgggacgagctgactaagaaccaggtcagtctgacctgtctggtgaaaggattctatcccagcgatatcgctgtggagtgggaatccaatggccagcctgagaacaattacaagaccacaccccctgtgctggactctgatggcagtttctttctgtatagtaagctgaccgtcgataaatcacgatggcagcaggggaacgtgttcagctgttcagtgatgcacgaagccctgcacaaccattacacccagaagagcctgagcctgtctcccggc

SEQ ID NO: 114 - protein, 441 aa, Artificial Sequence
  Clone No. 14398
QLQESGAELLRPGASVKLSCTASGFNIKDDYLHWVKQRPEQGLEWIGWIDPENGDTEYASKFQGKATIKADTSSNTAYLQLSSLTSEDTAVYYCSTQGFACWGQGTLVTVSAASTKGPSVFPLAPSSKSTSGGTAALGCLVKDYFPEPVTVSWNSGALTSGVHTFPAVLQSSGLYSLSSVVTVPSSSLGTQTYICNVNHKPSNTKVDKKVEPKSCDKTHTCPPCPAPEAAGGPSVFLFPPKPKDTLMISRTPEVTCVVVSVSHEDPEVKFNWYVDGVEVHNAKTKPREEQYNSTYRVVSVLTVLHQDWLNGKEYKCKVSNKALPAPIEKTISKAKGQPREPQVYTLPPSRDELTKNQVSLTCLVKGFYPSDIAVEWESNGQPENNYKTTPPVLDSDGSFFLYSKLTVDKSRWQQGNVFSCSVMHEALHNHYTQKSLSLSPG

SEQ ID NO: 115 - DNA, 1323 bp, Artificial Sequence
  Clone No. 14398
cagctgcaggagtctggagccgagctgctgagacccggggccagcgtgaagctgtcttgcacagccagcggcttcaacatcaaggacgattacctgcactgggtgaagcagagacccgagcagggactggagtggatcggatggatcgaccctgagaacggcgataccgagtacgccagcaagtttcagggcaaggccacaatcaaggccgacaccagctccaatacagcctatctgcagctgtctagcctgacctccgaggatacagccgtgtactattgctctacccagggattcgcatgttggggacagggcaccctggtgacagtgtccgccgctagcacaaagggcccctccgtgtttcctctggccccatcctctaagtccacctctggaggaacagccgccctgggctgtctggtgaaggattacttccctgagccagtgaccgtgtcctggaactctggggccctgaccagcggagtgcacacatttcccgccgtgctgcagagctccggactgtactccctgtctagcgtggtgaccgtgccttcctctagcctgggcacccagacatatatctgcaacgtgaatcacaagccttccaatacaaaggtcgacaagaaggtggagccaaagtcttgtgataagacccacacatgcccaccttgtccggcgccagaggccgccggaggaccaagcgtgttcctgtttccacccaagcccaaggacaccctgatgatctcccggaccccagaggtgacatgcgtggtggtgagcgtgtcccacgaggaccccgaggtgaagtttaactggtacgtggatggcgtggaggtgcacaatgccaagacaaagccccgggaggagcagtacaattctacctatagagtggtgagcgtgctgacagtgctgcaccaggattggctgaacggcaaggagtataagtgtaaggtgagcaataaggccctgccagcccccatcgagaagaccatctccaaggccaagggccagcctcgcgaaccacaggtgtacactctgcctccatctcgggacgagctgactaagaaccaggtcagtctgacctgtctggtgaaaggattctatcccagcgatatcgctgtggagtgggaatccaatggccagcctgagaacaattacaagaccacaccccctgtgctggactctgatggcagtttctttctgtatagtaagctgaccgtcgataaatcacgatggcagcaggggaacgtgttcagctgttcagtgatgcacgaagccctgcacaaccattacacccagaagagcctgagcctgtctcccggc

SEQ ID NO: 116 - protein, 450 aa, Artificial Sequence
  Clone No. 14399
EVKLVESEGGLVQPGSSMKLSCTASGFTFSDYYMAWVRQVPEKGLEWVAHINYDGSGTYYLDSLKGRFIISRDNAKNILYLQMSSLKSEDTATYYCARDCYGSSSYAVDYWGQGTSVTVSSASTKGPSVFPLAPSSKSTSGGTAALGCLVKDYFPEPVTVSWNSGALTSGVHTFPAVLQSSGLYSLSSVVTVPSSSLGTQTYICNVNHKPSNTKVDKKVEPKSCDKTHTCPPCPAPEAAGGPSVFLFPPKPKDTLMISRTPEVTCVVVSVSHEDPEVKFNWYVDGVEVHNAKTKPREEQYNSTYRVVSVLTVLHQDWLNGKEYKCKVSNKALPAPIEKTISKAKGQPREPQVYTLPPSRDELTKNQVSLTCLVKGFYPSDIAVEWESNGQPENNYKTTPPVLDSDGSFFLYSKLTVDKSRWQQGNVFSCSVMHEALHNHYTQKSLSLSPG

SEQ ID NO: 117 - DNA, 1350 bp, Artificial Sequence
  Clone No. 14399
gaggtgaagctggtggagagcgagggaggactggtgcagccaggcagctccatgaagctgagctgcaccgcctccggcttcacattttccgactactatatggcatgggtgcggcaggtgccagagaagggactggagtgggtggcccacatcaactacgacggctctggcacatactatctggatagcctgaagggccggtttatcatctccagagacaacgccaagaatatcctgtacctgcagatgtctagcctgaagtctgaggacaccgccacatactattgcgccagggattgttatggctcctctagctacgccgtggattattggggccagggcacctctgtgacagtgtcctctgctagcacaaagggcccctccgtgtttcctctggccccatcctctaagtccacctctggaggaacagccgccctgggctgtctggtgaaggattacttccctgagccagtgaccgtgtcctggaactctggggccctgaccagcggagtgcacacatttcccgccgtgctgcagagctccggactgtactccctgtctagcgtggtgaccgtgccttcctctagcctgggcacccagacatatatctgcaacgtgaatcacaagccttccaatacaaaggtcgacaagaaggtggagccaaagtcttgtgataagacccacacatgcccaccttgtccggcgccagaggccgccggaggaccaagcgtgttcctgtttccacccaagcccaaggacaccctgatgatctcccggaccccagaggtgacatgcgtggtggtgagcgtgtcccacgaggaccccgaggtgaagtttaactggtacgtggatggcgtggaggtgcacaatgccaagacaaagccccgggaggagcagtacaattctacctatagagtggtgagcgtgctgacagtgctgcaccaggattggctgaacggcaaggagtataagtgtaaggtgagcaataaggccctgccagcccccatcgagaagaccatctccaaggccaagggccagcctcgcgaaccacaggtgtacactctgcctccatctcgggacgagctgactaagaaccaggtcagtctgacctgtctggtgaaaggattctatcccagcgatatcgctgtggagtgggaatccaatggccagcctgagaacaattacaagaccacaccccctgtgctggactctgatggcagtttctttctgtatagtaagctgaccgtcgataaatcacgatggcagcaggggaacgtgttcagctgttcagtgatgcacgaagccctgcacaaccattacacccagaagagcctgagcctgtctcccggc

SEQ ID NO: 118 - protein, 447 aa, Artificial Sequence
  Clone No. 14400
QVQLQESGPGLVQPTQSLSITCTVSGFSLISYGVHWVRQSPGKGLEWLGVIWSGGSTDYNAAFISRLSISKDNSKSQVFFKMNSLQADDTAIYYCARNPLTATVMDYWGQGTSVTVSSASTKGPSVFPLAPSSKSTSGGTAALGCLVKDYFPEPVTVSWNSGALTSGVHTFPAVLQSSGLYSLSSVVTVPSSSLGTQTYICNVNHKPSNTKVDKKVEPKSCDKTHTCPPCPAPEAAGGPSVFLFPPKPKDTLMISRTPEVTCVVVSVSHEDPEVKFNWYVDGVEVHNAKTKPREEQYNSTYRVVSVLTVLHQDWLNGKEYKCKVSNKALPAPIEKTISKAKGQPREPQVYTLPPSRDELTKNQVSLTCLVKGFYPSDIAVEWESNGQPENNYKTTPPVLDSDGSFFLYSKLTVDKSRWQQGNVFSCSVMHEALHNHYTQKSLSLSPG

SEQ ID NO: 119 - DNA, 1341 bp, Artificial Sequence
  Clone No. 14400
caggtgcagctgcaggagagcggaccaggactggtgcagcctacacagtctctgagcatcacctgcacagtgtctggcttcagcctgatctcctacggagtgcactgggtgaggcagtcccctggcaagggactggagtggctgggcgtgatctggtctggcggcagcaccgactataacgccgcctttatctcccgcctgtccatctctaaggataacagcaagtcccaggtgttctttaagatgaacagcctgcaggccgacgatacagccatctactattgtgcccggaatcccctgaccgccacagtgatggactactggggccagggcacctctgtgacagtgagctccgctagcacaaagggcccctccgtgtttcctctggccccatcctctaagtccacctctggaggaacagccgccctgggctgtctggtgaaggattacttccctgagccagtgaccgtgtcctggaactctggggccctgaccagcggagtgcacacatttcccgccgtgctgcagagctccggactgtactccctgtctagcgtggtgaccgtgccttcctctagcctgggcacccagacatatatctgcaacgtgaatcacaagccttccaatacaaaggtcgacaagaaggtggagccaaagtcttgtgataagacccacacatgcccaccttgtccggcgccagaggccgccggaggaccaagcgtgttcctgtttccacccaagcccaaggacaccctgatgatctcccggaccccagaggtgacatgcgtggtggtgagcgtgtcccacgaggaccccgaggtgaagtttaactggtacgtggatggcgtggaggtgcacaatgccaagacaaagccccgggaggagcagtacaattctacctatagagtggtgagcgtgctgacagtgctgcaccaggattggctgaacggcaaggagtataagtgtaaggtgagcaataaggccctgccagcccccatcgagaagaccatctccaaggccaagggccagcctcgcgaaccacaggtgtacactctgcctccatctcgggacgagctgactaagaaccaggtcagtctgacctgtctggtgaaaggattctatcccagcgatatcgctgtggagtgggaatccaatggccagcctgagaacaattacaagaccacaccccctgtgctggactctgatggcagtttctttctgtatagtaagctgaccgtcgataaatcacgatggcagcaggggaacgtgttcagctgttcagtgatgcacgaagccctgcacaaccattacacccagaagagcctgagcctgtctcccggc

SEQ ID NO: 120 - protein, 446 aa, Artificial Sequence
  Clone No. 14401
QVQLKESGPGLVAPSQSLSITCTVSGFSLTSYAISWVRQPPGKGLEWLGVIWPGGGTNYNSALKSRLSISKDNSKSQVFLKMNSLQTDDTARYYCARGTGTWYFDVWGAGTTVTVSSASTKGPSVFPLAPSSKSTSGGTAALGCLVKDYFPEPVTVSWNSGALTSGVHTFPAVLQSSGLYSLSSVVTVPSSSLGTQTYICNVNHKPSNTKVDKKVEPKSCDKTHTCPPCPAPEAAGGPSVFLFPPKPKDTLMISRTPEVTCVVVSVSHEDPEVKFNWYVDGVEVHNAKTKPREEQYNSTYRVVSVLTVLHQDWLNGKEYKCKVSNKALPAPIEKTISKAKGQPREPQVYTLPPSRDELTKNQVSLTCLVKGFYPSDIAVEWESNGQPENNYKTTPPVLDSDGSFFLYSKLTVDKSRWQQGNVFSCSVMHEALHNHYTQKSLSLSPG

SEQ ID NO: 121 - DNA, 1338 bp, Artificial Sequence
  Clone No. 14401
caggtgcagctgaaggagtctggaccaggactggtggccccctctcagagcctgtccatcacctgcacagtgagcggcttttccctgacctcttacgcaatctcctgggtgcggcagccacctggcaagggactggagtggctgggcgtgatctggccaggaggaggcacaaactataatagcgccctgaagtccaggctgtctatcagcaaggacaactccaagtctcaggtgttcctgaagatgaatagcctgcagaccgacgatacagcccggtactattgtgccagaggcaccggcacatggtactttgacgtgtggggggcagggaccacagtgacagtgagctccgctagcacaaagggcccctccgtgtttcctctggccccatcctctaagtccacctctggaggaacagccgccctgggctgtctggtgaaggattacttccctgagccagtgaccgtgtcctggaactctggggccctgaccagcggagtgcacacatttcccgccgtgctgcagagctccggactgtactccctgtctagcgtggtgaccgtgccttcctctagcctgggcacccagacatatatctgcaacgtgaatcacaagccttccaatacaaaggtcgacaagaaggtggagccaaagtcttgtgataagacccacacatgcccaccttgtccggcgccagaggccgccggaggaccaagcgtgttcctgtttccacccaagcccaaggacaccctgatgatctcccggaccccagaggtgacatgcgtggtggtgagcgtgtcccacgaggaccccgaggtgaagtttaactggtacgtggatggcgtggaggtgcacaatgccaagacaaagccccgggaggagcagtacaattctacctatagagtggtgagcgtgctgacagtgctgcaccaggattggctgaacggcaaggagtataagtgtaaggtgagcaataaggccctgccagcccccatcgagaagaccatctccaaggccaagggccagcctcgcgaaccacaggtgtacactctgcctccatctcgggacgagctgactaagaaccaggtcagtctgacctgtctggtgaaaggattctatcccagcgatatcgctgtggagtgggaatccaatggccagcctgagaacaattacaagaccacaccccctgtgctggactctgatggcagtttctttctgtatagtaagctgaccgtcgataaatcacgatggcagcaggggaacgtgttcagctgttcagtgatgcacgaagccctgcacaaccattacacccagaagagcctgagcctgtctcccggc

SEQ ID NO: 122 - protein, 219 aa, Artificial Sequence
  Clone No. 14402
DVVMTQTPLSLPVSLGDQASISCRSSQSIVHSNGNTYLEWYLQKPGQSPKLLIYKVSNRFSGVPDRFSARGSGTDFSLKISRVEAEDLGVYYCFQGSHVPYTFGGGTKLEIKRTVAAPSVFIFPPSDEQLKSGTASVVCLLNNFYPREAKVQWKVDNALQSGNSQESVTEQDSKDSTYSLSSTLTLSKADYEKHKVYACEVTHQGLSSPVTKSFNRGEC

SEQ ID NO: 123 - DNA, 657 bp, Artificial Sequence
  Clone No. 14402
gacgtggtcatgacccagacacccctgtccctgcccgtgagcctgggcgaccaggcctctatcagctgcaggagctcccagagcatcgtgcactccaacggcaatacctacctggagtggtatctgcagaagccaggccagtctcccaagctgctgatctacaaggtgtctaaccggttcagcggagtgccagaccggttttccgccagaggctctggcacagacttcagcctgaagatctccagagtggaggccgaggacctgggcgtgtactattgtttccagggctcccacgtgccttatacctttggcggcggcacaaagctggagatcaagagaacagtggcggcgcccagtgtcttcatttttccccctagcgacgaacagctgaagtctgggacagccagtgtggtctgtctgctgaacaacttctaccctagagaggctaaagtgcagtggaaggtcgataacgcactgcagtccggaaattctcaggagagtgtgactgaacaggactcaaaagatagcacctattccctgtcaagcacactgactctgagcaaggccgactacgagaagcataaagtgtatgcttgtgaagtcacccaccaggggctgagttcaccagtcacaaaatcattcaacagaggggagtgc

SEQ ID NO: 124 - protein, 214 aa, Artificial Sequence
  Clone No. 14404
DIVMTQSHKFMSTSVGDRVSITCKASQDVGTAVGWYQQKLGQSPKLLIYWASTRRTGVPDRFTGSGSGTDFTLTISNVQSEDLADYFCQQYSSYPLTFGAGTKLELKRTVAAPSVFIFPPSDEQLKSGTASVVCLLNNFYPREAKVQWKVDNALQSGNSQESVTEQDSKDSTYSLSSTLTLSKADYEKHKVYACEVTHQGLSSPVTKSFNRGEC

SEQ ID NO: 125 - DNA, 642 bp, Artificial Sequence
  Clone No. 14404
gacatcgtgatgacccagagccacaagtttatgtctacaagcgtgggcgaccgcgtgtctatcacctgcaaggccagccaggatgtgggaacagccgtgggctggtaccagcagaagctgggccagtcccccaagctgctgatctattgggcctctacccggagaacaggagtgcctgaccggttcaccggctccggctctggcacagacttcaccctgacaatcagcaacgtgcagtccgaggacctggccgattacttctgtcagcagtacagctcctatcccctgaccttcggggcagggacaaagctggagctgaagaggacagtggcggcgcccagtgtcttcatttttccccctagcgacgaacagctgaagtctgggacagccagtgtggtctgtctgctgaacaacttctaccctagagaggctaaagtgcagtggaaggtcgataacgcactgcagtccggaaattctcaggagagtgtgactgaacaggactcaaaagatagcacctattccctgtcaagcacactgactctgagcaaggccgactacgagaagcataaagtgtatgcttgtgaagtcacccaccaggggctgagttcaccagtcacaaaatcattcaacagaggggagtgc

SEQ ID NO: 126 - protein, 214 aa, Artificial Sequence
  Clone No. 14405
DIVMTQSQKFMSTSVGDRVSVTCKASQNVGTNVAWYQQKPGQSRTVLIYSASYRHSGVPDRFTGSGSGTDFTLTISNVQSEDLAEYFCQQYNSYPLTFGTGTKLELKRTVAAPSVFIFPPSDEQLKSGTASVVCLLNNFYPREAKVQWKVDNALQSGNSQESVTEQDSKDSTYSLSSTLTLSKADYEKHKVYACEVTHQGLSSPVTKSFNRGEC

SEQ ID NO: 127 - DNA, 642 bp, Artificial Sequence
  Clone No. 14405
gacatcgtgatgacccagagccagaagtttatgagcacatccgtgggcgatcgcgtgtctgtgacctgcaaggccagccagaacgtgggcacaaatgtggcctggtaccagcagaagccaggccagtcccggacagtgctgatctactctgccagctatcggcactctggagtgccagacagattcaccggctccggctctggcacagacttcaccctgacaatcagcaacgtgcagtccgaggacctggccgagtatttctgtcagcagtacaattcctatcccctgacctttggcaccggcacaaagctggagctgaagaggacagtggcggcgcccagtgtcttcatttttccccctagcgacgaacagctgaagtctgggacagccagtgtggtctgtctgctgaacaacttctaccctagagaggctaaagtgcagtggaaggtcgataacgcactgcagtccggaaattctcaggagagtgtgactgaacaggactcaaaagatagcacctattccctgtcaagcacactgactctgagcaaggccgactacgagaagcataaagtgtatgcttgtgaagtcacccaccaggggctgagttcaccagtcacaaaatcattcaacagaggggagtgc

SEQ ID NO: 128 - protein, 219 aa, Artificial Sequence
  Clone No. 14406
DIVMTQAAFSNPVTLGTSASISCRSSKSLLHSYGITYLYWYLQKPGQSPQLLIYQMSNLASGVPDRFSSSGSGTDFTLRISRVEAEDVGVYYCAQNLELPLTFGAGTKLELKRTVAAPSVFIFPPSDEQLKSGTASVVCLLNNFYPREAKVQWKVDNALQSGNSQESVTEQDSKDSTYSLSSTLTLSKADYEKHKVYACEVTHQGLSSPVTKSFNRGEC

SEQ ID NO: 129 - DNA, 657 bp, Artificial Sequence
  Clone No. 14406
gacatcgtgatgacacaggccgccttttctaaccccgtgaccctgggcacatctgccagcatctcctgccggagctccaagtctctgctgcacagctatggcatcacctacctgtattggtacctgcagaagcccggccagtcccctcagctgctgatctaccagatgtccaacctggcctctggcgtgcctgacaggttctctagctccggcagcggaaccgacttcaccctgcggatctccagagtggaggccgaggatgtgggcgtgtactattgtgcccagaatctggagctgccactgaccttcggggcagggacaaagctggagctgaagcggacagtggcggcgcccagtgtcttcatttttccccctagcgacgaacagctgaagtctgggacagccagtgtggtctgtctgctgaacaacttctaccctagagaggctaaagtgcagtggaaggtcgataacgcactgcagtccggaaattctcaggagagtgtgactgaacaggactcaaaagatagcacctattccctgtcaagcacactgactctgagcaaggccgactacgagaagcataaagtgtatgcttgtgaagtcacccaccaggggctgagttcaccagtcacaaaatcattcaacagaggggagtgc

SEQ ID NO: 130 - protein, 213 aa, Artificial Sequence
  Clone No. 14407
QIVLTQSPAIMSASPGEKVTMTCSASSSVSYMHWYQQKSGTSPKRWVYDTSKLASGVPARFSGSGSGTSYSLTISSMEAEDVATYYCQQWSSNPPTFGGGTKLEIKRTVAAPSVFIFPPSDEQLKSGTASVVCLLNNFYPREAKVQWKVDNALQSGNSQESVTEQDSKDSTYSLSSTLTLSKADYEKHKVYACEVTHQGLSSPVTKSFNRGEC

SEQ ID NO: 131 - DNA, 639 bp, Artificial Sequence
  Clone No. 14407
cagatcgtgctgacacagagcccagccatcatgtccgcctctccaggagagaaggtgaccatgacatgcagcgccagctccagcgtgagctacatgcactggtatcagcagaagtctggcaccagccctaagcggtgggtgtacgacacatccaagctggcctctggagtgccagccagattcagcggctccggctctggcaccagctattccctgacaatcagctccatggaggccgaggatgtggccacctactattgtcagcagtggtctagcaacccccctacctttggcggcggcacaaagctggagatcaagcggacagtggcggcgcccagtgtcttcatttttccccctagcgacgaacagctgaagtctgggacagccagtgtggtctgtctgctgaacaacttctaccctagagaggctaaagtgcagtggaaggtcgataacgcactgcagtccggaaattctcaggagagtgtgactgaacaggactcaaaagatagcacctattccctgtcaagcacactgactctgagcaaggccgactacgagaagcataaagtgtatgcttgtgaagtcacccaccaggggctgagttcaccagtcacaaaatcattcaacagaggggagtgc

SEQ ID NO: 132 - protein, 219 aa, Artificial Sequence
  Clone No. 14408
DVVMTQTPLSLPVSLGDQASISCRSSQSLVHSNGNTYLHWYLQKPGQSPKLLIYKVSNRFFGVPDRFSGSGSGTDFTLKISRVEAEDLGVYFCSQTTYVPLTFGAGTKLELKRTVAAPSVFIFPPSDEQLKSGTASVVCLLNNFYPREAKVQWKVDNALQSGNSQESVTEQDSKDSTYSLSSTLTLSKADYEKHKVYACEVTHQGLSSPVTKSFNRGEC

SEQ ID NO: 133 - DNA, 657 bp, Artificial Sequence
  Clone No. 14408
gacgtggtcatgacccagacacccctgtccctgcccgtgagcctgggcgaccaggcctctatcagctgccggagctcccagagcctggtgcactccaacggcaatacatacctgcactggtatctgcagaagccaggccagtctcccaagctgctgatctacaaggtgagcaaccggttctttggcgtgcccgacagattctccggctctggcagcggaaccgacttcaccctgaagatctcccgggtggaggcagaggacctgggcgtgtacttctgttctcagaccacatatgtgcctctgaccttcggggcagggacaaagctggagctgaagaggaccgtggcggcgcccagtgtcttcatttttccccctagcgacgaacagctgaagtctgggacagccagtgtggtctgtctgctgaacaacttctaccctagagaggctaaagtgcagtggaaggtcgataacgcactgcagtccggaaattctcaggagagtgtgactgaacaggactcaaaagatagcacctattccctgtcaagcacactgactctgagcaaggccgactacgagaagcataaagtgtatgcttgtgaagtcacccaccaggggctgagttcaccagtcacaaaatcattcaacagaggggagtgc

SEQ ID NO: 134 - protein, 214 aa, Artificial Sequence
  Clone No. 14409
NIVMTQSPKSMSMSVGERVTLSCKASENVGSYVSWYQQKPEKSPKLLIYGASNRYTGVPDRFTGSGSATDFTLTISSVQAEDLADYHCGQSYSYPLTFGAGTKLELKRTVAAPSVFIFPPSDEQLKSGTASVVCLLNNFYPREAKVQWKVDNALQSGNSQESVTEQDSKDSTYSLSSTLTLSKADYEKHKVYACEVTHQGLSSPVTKSFNRGEC

SEQ ID NO: 135 - DNA, 642 bp, Artificial Sequence
  Clone No. 14409
aacatcgtgatgacccagtcccccaagtctatgagcatgtccgtgggcgagcgcgtgacactgtcttgcaaggccagcgagaacgtgggcagctacgtgtcctggtatcagcagaagcccgagaagtcccctaagctgctgatctacggggccagcaatcggtataccggcgtgcctgacagattcaccggctctggcagcgccacagacttcaccctgacaatcagctccgtgcaggcagaggacctggcagattaccactgtggccagtcctactcttatccactgaccttcggggcagggacaaagctggagctgaagaggacagtggcggcgcccagtgtcttcatttttccccctagcgacgaacagctgaagtctgggacagccagtgtggtctgtctgctgaacaacttctaccctagagaggctaaagtgcagtggaaggtcgataacgcactgcagtccggaaattctcaggagagtgtgactgaacaggactcaaaagatagcacctattccctgtcaagcacactgactctgagcaaggccgactacgagaagcataaagtgtatgcttgtgaagtcacccaccaggggctgagttcaccagtcacaaaatcattcaacagaggggagtgc

SEQ ID NO: 136 - protein, 222 aa, Artificial Sequence
  Clone No. 14410
DIVMTQSPSSLAVTAGEKVTMRCKSSQSLLWSVNQNNYLSWYQQKQGQPPKLLIYGASIRESWVPDRFTGSGSGTDFTLTISNVHAEDLAVYYCQHNHGSFLPYTFGGGTKLEIKRTVAAPSVFIFPPSDEQLKSGTASVVCLLNNFYPREAKVQWKVDNALQSGNSQESVTEQDSKDSTYSLSSTLTLSKADYEKHKVYACEVTHQGLSSPVTKSFNRGEC

SEQ ID NO: 137 - DNA, 666 bp, Artificial Sequence
  Clone No. 14410
gacatcgtgatgacacagagcccaagctccctggccgtgaccgccggggagaaggtgacaatgcggtgcaagtctagccagagcctgctgtggtccgtgaaccagaacaattacctgtcctggtatcagcagaagcagggccagccccctaagctgctgatctacggggccagcatccgggagagctgggtgcctgacagattcaccggctccggctctggcacagacttcaccctgacaatctccaacgtgcacgccgaggatctggccgtgtactattgtcagcacaatcacggctctttcctgccatatacctttggcggcggcacaaagctggagatcaagaggaccgtggcggcgcccagtgtcttcatttttccccctagcgacgaacagctgaagtctgggacagccagtgtggtctgtctgctgaacaacttctaccctagagaggctaaagtgcagtggaaggtcgataacgcactgcagtccggaaattctcaggagagtgtgactgaacaggactcaaaagatagcacctattccctgtcaagcacactgactctgagcaaggccgactacgagaagcataaagtgtatgcttgtgaagtcacccaccaggggctgagttcaccagtcacaaaatcattcaacagaggggagtgc

SEQ ID NO: 138 - protein, 214 aa, Artificial Sequence
  Clone No. 14411
DIQMTQTTSSLSASLGDRVTFSCSASQGISNYLNWYQQKPDGTVKLLIYYTSSLHLGVPSRFSGSGSGTDYSLTISNLEPEDIATYYCQQYSKLPWTFGGGTKLEIKRTVAAPSVFIFPPSDEQLKSGTASVVCLLNNFYPREAKVQWKVDNALQSGNSQESVTEQDSKDSTYSLSSTLTLSKADYEKHKVYACEVTHQGLSSPVTKSFNRGEC

SEQ ID NO: 139 - DNA, 642 bp, Artificial Sequence
  Clone No. 14411
gacatccagatgacccagaccacaagctccctgtccgcctctctgggcgatagagtgaccttcagctgctccgcctctcagggcatctctaactacctgaattggtatcagcagaagcctgacggcaccgtgaagctgctgatctactatacatctagcctgcacctgggcgtgccatccaggttcagcggctccggctctggaaccgactacagcctgacaatctccaacctggagcccgaggatatcgccacctactattgtcagcagtatagcaagctgccttggacctttggcggcggcacaaagctggagatcaagcgcacagtggcggcgcccagtgtcttcatttttccccctagcgacgaacagctgaagtctgggacagccagtgtggtctgtctgctgaacaacttctaccctagagaggctaaagtgcagtggaaggtcgataacgcactgcagtccggaaattctcaggagagtgtgactgaacaggactcaaaagatagcacctattccctgtcaagcacactgactctgagcaaggccgactacgagaagcataaagtgtatgcttgtgaagtcacccaccaggggctgagttcaccagtcacaaaatcattcaacagaggggagtgc

SEQ ID NO: 140 - protein, 214 aa, Artificial Sequence
  Clone No. 14412
NIVMTQSPKSMSMSVGERVTLSCKASDNVGISVSWYQQKPEQSPKLLIYGASNRYTGVPDRFTGTGSATDFTLTISSVQAEDLADYHCGQSYSYPFTFGSGTKLEIKRTVAAPSVFIFPPSDEQLKSGTASVVCLLNNFYPREAKVQWKVDNALQSGNSQESVTEQDSKDSTYSLSSTLTLSKADYEKHKVYACEVTHQGLSSPVTKSFNRGEC

SEQ ID NO: 141 - DNA, 642 bp, Artificial Sequence
  Clone No. 14412
aacatcgtgatgacccagtcccccaagtctatgagcatgtccgtgggcgagcgcgtgacactgagctgcaaggcctccgacaacgtgggcatctctgtgagctggtaccagcagaagcccgagcagtctcctaagctgctgatctacggggccagcaatcggtataccggcgtgcctgacagattcaccggcacaggctccgccacagacttcaccctgacaatcagctccgtgcaggcagaggacctggcagattatcactgtggccagtcctactcttatccattcacctttggctctggcacaaagctggagatcaagaggacagtggcggcgcccagtgtcttcatttttccccctagcgacgaacagctgaagtctgggacagccagtgtggtctgtctgctgaacaacttctaccctagagaggctaaagtgcagtggaaggtcgataacgcactgcagtccggaaattctcaggagagtgtgactgaacaggactcaaaagatagcacctattccctgtcaagcacactgactctgagcaaggccgactacgagaagcataaagtgtatgcttgtgaagtcacccaccaggggctgagttcaccagtcacaaaatcattcaacagaggggagtgc

SEQ ID NO: 142 - protein, 695 aa, Artificial Sequence
  Clone No. 18509
QVQLKESGPGLVAPSQSLSITCTVSGFSLTTYAISWVRQPPGKGLEWLGIIWPGGGTNYNSALKSRLSISKDNSRSQVFLKMNSLQTDDTARYYCARGAGTWYFDVWGAGTTVTVSSASTKGPSVFPLAPSSKSTSGGTAALGCLVKDYFPEPVTVSWNSGALTSGVHTFPAVLQSSGLYSLSSVVTVPSSSLGTQTYICNVNHKPSNTKVDKKVEPKSCDKTHTCPPCPAPEAAGGPSVFLFPPKPKDTLMISRTPEVTCVVVSVSHEDPEVKFNWYVDGVEVHNAKTKPREEQYNSTYRVVSVLTVLHQDWLNGKEYKCKVSNKALPAPIEKTISKAKGQPREPQVYVYPPSRDELTKNQVSLTCLVKGFYPSDIAVEWESNGQPENNYKTTPPVLDSDGSFALVSKLTVDKSRWQQGNVFSCSVMHEALHNHYTQKSLSLSPGGGGGQEQLVESGGGLVQPEGSLTLTCTASKFSFSSLYYMCWVRQAPGKGLEWIACVYGGSSGNTYYASWAKGRFTISKASSTTVTLQLTSLTAADTATYFCARFDVDGSGFNLWGPGTLVTVSSGGGGSGGGGSGGGGSDIVMTQTPSSVSAAVGGTVTIKCQASQTIGSSLAWYQQKPGQPPKLLIYRASTLASGVSSRFRGSGSGTEYTLTISDLECADAATYYCQWTDYGYIYIWAFGGGTEVVVK

SEQ ID NO: 143 - DNA, 2085 bp, Artificial Sequence
  Clone No. 18509
caggtgcagctgaaggagtccggaccaggactggtggccccctctcagagcctgtccatcacctgcacagtgagcggcttttccctgaccacatacgcaatctcttgggtgcggcagccacctggcaagggactggagtggctgggaatcatctggccaggaggaggcacaaactataattctgccctgaagagcaggctgtctatcagcaaggacaactcccgctctcaggtgttcctgaagatgaacagcctgcagaccgacgatacagcaaggtactattgtgcccggggggcagggacctggtactttgacgtgtggggggcagggaccacagtgacagtgagctccgctagcacaaagggcccctccgtgtttcctctggccccatcctctaagtccacctctggaggaacagccgccctgggctgtctggtgaaggattacttccctgagccagtgaccgtgtcctggaactctggggccctgaccagcggagtgcacacatttcccgccgtgctgcagagctccggactgtactccctgtctagcgtggtgaccgtgccttcctctagcctgggcacccagacatatatctgcaacgtgaatcacaagccttccaatacaaaggtcgacaagaaggtggagccaaagtcttgtgataagacccacacatgcccaccttgtccggcgccagaggccgccggaggaccaagcgtgttcctgtttccacccaagcccaaggacaccctgatgatctcccggaccccagaggtgacatgcgtggtggtgagcgtgtcccacgaggaccccgaggtgaagtttaactggtacgtggatggcgtggaggtgcacaatgccaagacaaagccccgggaggagcagtacaattctacctatagagtggtgagcgtgctgacagtgctgcaccaggattggctgaacggcaaggagtataagtgtaaggtgagcaataaggccctgccagcccccatcgagaagaccatctccaaggccaagggccagcctcgcgagccccaggtgtacgtgtatccccctagcagagacgagctgacaaagaaccaggtgtccctgacctgcctggtgaagggcttctatccctctgatatcgccgtggagtgggagagcaatggccagcctgagaacaattacaagaccacaccacccgtgctggacagcgatggctccttcgccctggtgagcaagctgacagtggacaagtccaggtggcagcagggcaacgtgttttcttgtagcgtgatgcacgaggccctgcacaatcactatacccagaagtccctgtctctgagcccaggaggaggaggaggacaggagcagctggtggagtctggcggcggcctggtgcagccagagggctccctgaccctgacatgcaccgcctctaagttcagctttagctccctgtactatatgtgctgggtgaggcaggcccccggcaagggactggagtggatcgcctgcgtgtatggcggctctagcggcaacacctactatgcctcctgggccaagggccgcttcacaatctctaaggcctcctctaccacagtgaccctgcagctgacaagcctgaccgccgccgacacagccacctacttctgtgcccggtttgacgtggatggctccggctttaatctgtggggccctggcacactggtgaccgtgagctccggaggaggaggcagcggaggaggaggctccggcggcggcggctctgatatcgtgatgacacagaccccatctagcgtgagcgccgccgtgggaggcacagtgaccatcaagtgccaggcctcccagaccatcggctcctctctggcctggtatcagcagaagcctggccagcctccaaagctgctgatctacagagcctccacactggcctctggcgtgagctcccggttcagaggctccggctctggaaccgagtacacactgaccatcagcgacctggagtgcgcagatgcagcaacatactattgtcagtggaccgattacggctatatctacatctgggcctttggcggaggaaccgaggtggtggtgaag

SEQ ID NO: 144 - protein, 219 aa, Artificial Sequence
  Clone No. 14414
DVLMTQTPLSLPVSLGDQASISCRSSQSIVHSNGNTYLEWYLQKPGQSPKLLIYKVSNRFSGVPDRFSGSGSGTDFTLKISRVEAEDLGVYYCFQGSHVPWTFGGGTKLEIKRTVAAPSVFIFPPSDEQLKSGTASVVCLLNNFYPREAKVQWKVDNALQSGNSQESVTEQDSKDSTYSLSSTLTLSKADYEKHKVYACEVTHQGLSSPVTKSFNRGEC

SEQ ID NO: 145 - DNA, 657 bp, Artificial Sequence
  Clone No. 14414
gacgtgctgatgacccagacacccctgtccctgcccgtgagcctgggcgaccaggcctctatcagctgccggagctcccagagcatcgtgcactccaacggcaatacatacctggagtggtatctgcagaagccaggccagtcccccaagctgctgatctacaaggtgtctaaccggttcagcggcgtgcccgacagattttccggctctggcagcggaaccgacttcaccctgaagatctcccgggtggaggcagaggacctgggcgtgtactattgtttccagggctctcacgtgccttggacctttggcggcggcacaaagctggagatcaagaggaccgtggcggcgcccagtgtcttcatttttccccctagcgacgaacagctgaagtctgggacagccagtgtggtctgtctgctgaacaacttctaccctagagaggctaaagtgcagtggaaggtcgataacgcactgcagtccggaaattctcaggagagtgtgactgaacaggactcaaaagatagcacctattccctgtcaagcacactgactctgagcaaggccgactacgagaagcataaagtgtatgcttgtgaagtcacccaccaggggctgagttcaccagtcacaaaatcattcaacagaggggagtgc

SEQ ID NO: 146 - protein, 214 aa, Artificial Sequence
  Clone No. 14415
DIVMTQSQKFMSTSVGDRVSVTCKASQNVGTNVAWYQQKPGQSPKALIYSASYRDSGVPDRFTGSGSGTDFTLTISNVQSEDLAEYLCQQYNSYPLTFGAGTKLELKRTVAAPSVFIFPPSDEQLKSGTASVVCLLNNFYPREAKVQWKVDNALQSGNSQESVTEQDSKDSTYSLSSTLTLSKADYEKHKVYACEVTHQGLSSPVTKSFNRGEC

SEQ ID NO: 147 - DNA, 642 bp, Artificial Sequence
  Clone No. 14415
gacatcgtgatgacccagagccagaagtttatgagcacatccgtgggcgatcgcgtgtctgtgacctgcaaggccagccagaacgtgggcacaaatgtggcctggtaccagcagaagcccggccagtcccctaaggccctgatctactctgccagctatcgggactctggcgtgcctgatagattcaccggctccggctctggcacagactttaccctgacaatcagcaacgtgcagtccgaggatctggccgagtacctgtgccagcagtacaattcctatcccctgaccttcggggcagggacaaagctggagctgaagaggacagtggcggcgcccagtgtcttcatttttccccctagcgacgaacagctgaagtctgggacagccagtgtggtctgtctgctgaacaacttctaccctagagaggctaaagtgcagtggaaggtcgataacgcactgcagtccggaaattctcaggagagtgtgactgaacaggactcaaaagatagcacctattccctgtcaagcacactgactctgagcaaggccgactacgagaagcataaagtgtatgcttgtgaagtcacccaccaggggctgagttcaccagtcacaaaatcattcaacagaggggagtgc

SEQ ID NO: 148 - protein, 214 aa, Artificial Sequence
  Clone No. 14416
DIQMTQTTSSLSASLGDRVTISCSASQGISNYLNWYQQKPDGTVKLLIYYTSSLHSGVPSRFSGSGSGTDYSLTISNLEPEDIATYYCQQYSDLPWTFGGGTKLEIKRTVAAPSVFIFPPSDEQLKSGTASVVCLLNNFYPREAKVQWKVDNALQSGNSQESVTEQDSKDSTYSLSSTLTLSKADYEKHKVYACEVTHQGLSSPVTKSFNRGEC

SEQ ID NO: 149 - DNA, 642 bp, Artificial Sequence
  Clone No. 14416
gacatccagatgacccagaccacaagctccctgtccgcctctctgggcgatagagtgacaatcagctgctccgcctctcagggcatctccaactacctgaattggtatcagcagaagcctgacggcaccgtgaagctgctgatctactatacatctagcctgcacagcggagtgccatccaggttcagcggctccggctctggaaccgattactctctgacaatcagcaacctggagcccgaggacatcgccacctactattgtcagcagtattctgatctgccttggacctttggcggcggcacaaagctggagatcaagcgcacagtggcggcgcccagtgtcttcatttttccccctagcgacgaacagctgaagtctgggacagccagtgtggtctgtctgctgaacaacttctaccctagagaggctaaagtgcagtggaaggtcgataacgcactgcagtccggaaattctcaggagagtgtgactgaacaggactcaaaagatagcacctattccctgtcaagcacactgactctgagcaaggccgactacgagaagcataaagtgtatgcttgtgaagtcacccaccaggggctgagttcaccagtcacaaaatcattcaacagaggggagtgc

SEQ ID NO: 150 - protein, 446 aa, Artificial Sequence
  Clone No. 18519
QVQLKESGPGLVAPSQSLSITCTVSGFSLTTYAISWVRQPPGKGLEWLGIIWPGGGTNYNSALKSRLSISKDNSRSQVFLKMNSLQTDDTARYYCARGAGTWYFDVWGAGTTVTVSSASTKGPSVFPLAPSSKSTSGGTAALGCLVKDYFPEPVTVSWNSGALTSGVHTFPAVLQSSGLYSLSSVVTVPSSSLGTQTYICNVNHKPSNTKVDKKVEPKSCDKTHTCPPCPAPEAAGGPSVFLFPPKPKDTLMISRTPEVTCVVVSVSHEDPEVKFNWYVDGVEVHNAKTKPREEQYNSTYRVVSVLTVLHQDWLNGKEYKCKVSNKALPAPIEKTISKAKGQPREPQVYVLPPSRDELTKNQVSLLCLVKGFYPSDIAVEWESNGQPENNYLTWPPVLDSDGSFFLYSKLTVDKSRWQQGNVFSCSVMHEALHNHYTQKSLSLSPG

SEQ ID NO: 151 - DNA, 1338 bp, Artificial Sequence
  Clone No. 18519
caggtgcagctgaaggagtccggaccaggactggtggccccctctcagagcctgtccatcacctgcacagtgagcggcttttccctgaccacatacgcaatctcttgggtgcggcagccacctggcaagggactggagtggctgggaatcatctggccaggaggaggcacaaactataattctgccctgaagagcaggctgtctatcagcaaggacaactcccgctctcaggtgttcctgaagatgaacagcctgcagaccgacgatacagcaaggtactattgtgcccggggggcagggacctggtactttgacgtgtggggggcagggaccacagtgacagtgagctccgctagcacaaagggcccctccgtgtttcctctggccccatcctctaagtccacctctggaggaacagccgccctgggctgtctggtgaaggattacttccctgagccagtgaccgtgtcctggaactctggggccctgaccagcggagtgcacacatttcccgccgtgctgcagagctccggactgtactccctgtctagcgtggtgaccgtgccttcctctagcctgggcacccagacatatatctgcaacgtgaatcacaagccttccaatacaaaggtcgacaagaaggtggagccaaagtcttgtgataagacccacacatgcccaccttgtccggcgccagaggccgccggaggaccaagcgtgttcctgtttccacccaagcccaaggacaccctgatgatctcccggaccccagaggtgacatgcgtggtggtgagcgtgtcccacgaggaccccgaggtgaagtttaactggtacgtggatggcgtggaggtgcacaatgccaagacaaagccccgggaggagcagtacaattctacctatagagtggtgagcgtgctgacagtgctgcaccaggattggctgaacggcaaggagtataagtgtaaggtgagcaataaggccctgccagcccccatcgagaagaccatctccaaggccaagggccagcctcgcgaaccacaggtctacgtgctgccccctagccgcgacgaactgactaaaaatcaggtctctctgctgtgtctggtcaaaggattctacccttccgacatcgccgtggagtgggaaagtaacggccagcccgagaacaattacctgacctggccccctgtgctggactctgatgggagtttctttctgtattcaaagctgacagtcgataaaagccggtggcagcagggcaatgtgttcagctgctccgtcatgcacgaagcactgcacaaccattacactcagaagtccctgtccctgtcacctggc

SEQ ID NO: 152 - protein, 447 aa, Artificial Sequence
  Clone No. 18520
QVQLKQSGPGLVQPSQSLSITCTVSGFSLTSYGVHWVRQSPGKGLEWLGVIWSGGSTDYNAAFISRLSISKDNSKSQVFFKMNSLQADDTAIYYCARNPLTATVMDYWGQGTSVTVSSASTKGPSVFPLAPSSKSTSGGTAALGCLVKDYFPEPVTVSWNSGALTSGVHTFPAVLQSSGLYSLSSVVTVPSSSLGTQTYICNVNHKPSNTKVDKKVEPKSCDKTHTCPPCPAPEAAGGPSVFLFPPKPKDTLMISRTPEVTCVVVSVSHEDPEVKFNWYVDGVEVHNAKTKPREEQYNSTYRVVSVLTVLHQDWLNGKEYKCKVSNKALPAPIEKTISKAKGQPREPQVYVLPPSRDELTKNQVSLLCLVKGFYPSDIAVEWESNGQPENNYLTWPPVLDSDGSFFLYSKLTVDKSRWQQGNVFSCSVMHEALHNHYTQKSLSLSPG

SEQ ID NO: 153 - DNA, 1341 bp, Artificial Sequence
  Clone No. 18520
caggtgcagctgaagcagtccggaccaggactggtgcagccttctcagagcctgtccatcacctgcacagtgagcggcttctccctgacctcttacggcgtgcactgggtgaggcagtctcctggcaagggactggagtggctgggcgtgatctggagcggaggctccacagactataacgccgcctttatctctcgcctgtctatcagcaaggataactccaagtctcaggtgttctttaagatgaatagcctgcaggccgacgatacagccatctactattgtgcccggaatcccctgaccgccacagtgatggactactggggccagggcaccagcgtgacagtgagctccgctagcacaaagggcccctccgtgtttcctctggccccatcctctaagtccacctctggaggaacagccgccctgggctgtctggtgaaggattacttccctgagccagtgaccgtgtcctggaactctggggccctgaccagcggagtgcacacatttcccgccgtgctgcagagctccggactgtactccctgtctagcgtggtgaccgtgccttcctctagcctgggcacccagacatatatctgcaacgtgaatcacaagccttccaatacaaaggtcgacaagaaggtggagccaaagtcttgtgataagacccacacatgcccaccttgtccggcgccagaggccgccggaggaccaagcgtgttcctgtttccacccaagcccaaggacaccctgatgatctcccggaccccagaggtgacatgcgtggtggtgagcgtgtcccacgaggaccccgaggtgaagtttaactggtacgtggatggcgtggaggtgcacaatgccaagacaaagccccgggaggagcagtacaattctacctatagagtggtgagcgtgctgacagtgctgcaccaggattggctgaacggcaaggagtataagtgtaaggtgagcaataaggccctgccagcccccatcgagaagaccatctccaaggccaagggccagcctcgcgaaccacaggtctacgtgctgccccctagccgcgacgaactgactaaaaatcaggtctctctgctgtgtctggtcaaaggattctacccttccgacatcgccgtggagtgggaaagtaacggccagcccgagaacaattacctgacctggccccctgtgctggactctgatgggagtttctttctgtattcaaagctgacagtcgataaaagccggtggcagcagggcaatgtgttcagctgctccgtcatgcacgaagcactgcacaaccattacactcagaagtccctgtccctgtcacctggc

SEQ ID NO: 154 - protein, 446 aa, Artificial Sequence
  Clone No. 18521
QVQLKESGPGLVAPSQSLSITCTVSGFSLTSYAINWVRQPPGKGLEWLGVLWPGGGTNYNSALKSRLSISKDNSKSQVFLKMNSLQTDDTARYYCARGSGTWYFDVWGAGTTVTVSSASTKGPSVFPLAPSSKSTSGGTAALGCLVKDYFPEPVTVSWNSGALTSGVHTFPAVLQSSGLYSLSSVVTVPSSSLGTQTYICNVNHKPSNTKVDKKVEPKSCDKTHTCPPCPAPEAAGGPSVFLFPPKPKDTLMISRTPEVTCVVVSVSHEDPEVKFNWYVDGVEVHNAKTKPREEQYNSTYRVVSVLTVLHQDWLNGKEYKCKVSNKALPAPIEKTISKAKGQPREPQVYVLPPSRDELTKNQVSLLCLVKGFYPSDIAVEWESNGQPENNYLTWPPVLDSDGSFFLYSKLTVDKSRWQQGNVFSCSVMHEALHNHYTQKSLSLSPG

SEQ ID NO: 155 - DNA, 1338 bp, Artificial Sequence
  Clone No. 18521
caggtgcagctgaaggagagcggaccaggactggtggccccctctcagagcctgtccatcacctgcacagtgagcggcttttccctgacctcttacgccatcaactgggtgcggcagccacctggcaagggactggagtggctgggcgtgctgtggccaggaggaggcacaaactataatagcgccctgaagtccaggctgtctatcagcaaggacaactccaagtctcaggtgttcctgaagatgaacagcctgcagaccgacgatacagcccggtactattgtgccagaggctccggcacctggtactttgacgtgtggggggcagggaccacagtgacagtgagctccgctagcacaaagggcccctccgtgtttcctctggccccatcctctaagtccacctctggaggaacagccgccctgggctgtctggtgaaggattacttccctgagccagtgaccgtgtcctggaactctggggccctgaccagcggagtgcacacatttcccgccgtgctgcagagctccggactgtactccctgtctagcgtggtgaccgtgccttcctctagcctgggcacccagacatatatctgcaacgtgaatcacaagccttccaatacaaaggtcgacaagaaggtggagccaaagtcttgtgataagacccacacatgcccaccttgtccggcgccagaggccgccggaggaccaagcgtgttcctgtttccacccaagcccaaggacaccctgatgatctcccggaccccagaggtgacatgcgtggtggtgagcgtgtcccacgaggaccccgaggtgaagtttaactggtacgtggatggcgtggaggtgcacaatgccaagacaaagccccgggaggagcagtacaattctacctatagagtggtgagcgtgctgacagtgctgcaccaggattggctgaacggcaaggagtataagtgtaaggtgagcaataaggccctgccagcccccatcgagaagaccatctccaaggccaagggccagcctcgcgaaccacaggtctacgtgctgccccctagccgcgacgaactgactaaaaatcaggtctctctgctgtgtctggtcaaaggattctacccttccgacatcgccgtggagtgggaaagtaacggccagcccgagaacaattacctgacctggccccctgtgctggactctgatgggagtttctttctgtattcaaagctgacagtcgataaaagccggtggcagcagggcaatgtgttcagctgctccgtcatgcacgaagcactgcacaaccattacactcagaagtccctgtccctgtcacctggc

SEQ ID NO: 156 - protein, 447 aa, Artificial Sequence
  Clone No. 18522
QVQLQESGPGLVQPTQSLSITCTVSGFSLISYGVHWVRQSPGKGLEWLGVIWSGGSTDYNAAFISRLSISKDNSKSQVFFKMNSLQADDTAIYYCARNPLTATVMDYWGQGTSVTVSSASTKGPSVFPLAPSSKSTSGGTAALGCLVKDYFPEPVTVSWNSGALTSGVHTFPAVLQSSGLYSLSSVVTVPSSSLGTQTYICNVNHKPSNTKVDKKVEPKSCDKTHTCPPCPAPEAAGGPSVFLFPPKPKDTLMISRTPEVTCVVVSVSHEDPEVKFNWYVDGVEVHNAKTKPREEQYNSTYRVVSVLTVLHQDWLNGKEYKCKVSNKALPAPIEKTISKAKGQPREPQVYVLPPSRDELTKNQVSLLCLVKGFYPSDIAVEWESNGQPENNYLTWPPVLDSDGSFFLYSKLTVDKSRWQQGNVFSCSVMHEALHNHYTQKSLSLSPG

SEQ ID NO: 157 - DNA, 1341 bp, Artificial Sequence
  Clone No. 18522
caggtgcagctgcaggagagcggaccaggactggtgcagcctacacagtctctgagcatcacctgcacagtgtctggcttcagcctgatctcctacggagtgcactgggtgaggcagtcccctggcaagggactggagtggctgggcgtgatctggtctggcggcagcaccgactataacgccgcctttatctcccgcctgtccatctctaaggataacagcaagtcccaggtgttctttaagatgaacagcctgcaggccgacgatacagccatctactattgtgcccggaatcccctgaccgccacagtgatggactactggggccagggcacctctgtgacagtgagctccgctagcacaaagggcccctccgtgtttcctctggccccatcctctaagtccacctctggaggaacagccgccctgggctgtctggtgaaggattacttccctgagccagtgaccgtgtcctggaactctggggccctgaccagcggagtgcacacatttcccgccgtgctgcagagctccggactgtactccctgtctagcgtggtgaccgtgccttcctctagcctgggcacccagacatatatctgcaacgtgaatcacaagccttccaatacaaaggtcgacaagaaggtggagccaaagtcttgtgataagacccacacatgcccaccttgtccggcgccagaggccgccggaggaccaagcgtgttcctgtttccacccaagcccaaggacaccctgatgatctcccggaccccagaggtgacatgcgtggtggtgagcgtgtcccacgaggaccccgaggtgaagtttaactggtacgtggatggcgtggaggtgcacaatgccaagacaaagccccgggaggagcagtacaattctacctatagagtggtgagcgtgctgacagtgctgcaccaggattggctgaacggcaaggagtataagtgtaaggtgagcaataaggccctgccagcccccatcgagaagaccatctccaaggccaagggccagcctcgcgaaccacaggtctacgtgctgccccctagccgcgacgaactgactaaaaatcaggtctctctgctgtgtctggtcaaaggattctacccttccgacatcgccgtggagtgggaaagtaacggccagcccgagaacaattacctgacctggccccctgtgctggactctgatgggagtttctttctgtattcaaagctgacagtcgataaaagccggtggcagcagggcaatgtgttcagctgctccgtcatgcacgaagcactgcacaaccattacactcagaagtccctgtccctgtcacctggc

SEQ ID NO: 158 - protein, 446 aa, Artificial Sequence
  Clone No. 18523
QVQLKESGPGLVAPSQSLSITCTVSGFSLTSYAISWVRQPPGKGLEWLGVIWPGGGTNYNSALKSRLSISKDNSKSQVFLKMNSLQTDDTARYYCARGTGTWYFDVWGAGTTVTVSSASTKGPSVFPLAPSSKSTSGGTAALGCLVKDYFPEPVTVSWNSGALTSGVHTFPAVLQSSGLYSLSSVVTVPSSSLGTQTYICNVNHKPSNTKVDKKVEPKSCDKTHTCPPCPAPEAAGGPSVFLFPPKPKDTLMISRTPEVTCVVVSVSHEDPEVKFNWYVDGVEVHNAKTKPREEQYNSTYRVVSVLTVLHQDWLNGKEYKCKVSNKALPAPIEKTISKAKGQPREPQVYVLPPSRDELTKNQVSLLCLVKGFYPSDIAVEWESNGQPENNYLTWPPVLDSDGSFFLYSKLTVDKSRWQQGNVFSCSVMHEALHNHYTQKSLSLSPG

SEQ ID NO: 159 - DNA, 1338 bp, Artificial Sequence
  Clone No. 18523
caggtgcagctgaaggagtctggaccaggactggtggccccctctcagagcctgtccatcacctgcacagtgagcggcttttccctgacctcttacgcaatctcctgggtgcggcagccacctggcaagggactggagtggctgggcgtgatctggccaggaggaggcacaaactataatagcgccctgaagtccaggctgtctatcagcaaggacaactccaagtctcaggtgttcctgaagatgaatagcctgcagaccgacgatacagcccggtactattgtgccagaggcaccggcacatggtactttgacgtgtggggggcagggaccacagtgacagtgagctccgctagcacaaagggcccctccgtgtttcctctggccccatcctctaagtccacctctggaggaacagccgccctgggctgtctggtgaaggattacttccctgagccagtgaccgtgtcctggaactctggggccctgaccagcggagtgcacacatttcccgccgtgctgcagagctccggactgtactccctgtctagcgtggtgaccgtgccttcctctagcctgggcacccagacatatatctgcaacgtgaatcacaagccttccaatacaaaggtcgacaagaaggtggagccaaagtcttgtgataagacccacacatgcccaccttgtccggcgccagaggccgccggaggaccaagcgtgttcctgtttccacccaagcccaaggacaccctgatgatctcccggaccccagaggtgacatgcgtggtggtgagcgtgtcccacgaggaccccgaggtgaagtttaactggtacgtggatggcgtggaggtgcacaatgccaagacaaagccccgggaggagcagtacaattctacctatagagtggtgagcgtgctgacagtgctgcaccaggattggctgaacggcaaggagtataagtgtaaggtgagcaataaggccctgccagcccccatcgagaagaccatctccaaggccaagggccagcctcgcgaaccacaggtctacgtgctgccccctagccgcgacgaactgactaaaaatcaggtctctctgctgtgtctggtcaaaggattctacccttccgacatcgccgtggagtgggaaagtaacggccagcccgagaacaattacctgacctggccccctgtgctggactctgatgggagtttctttctgtattcaaagctgacagtcgataaaagccggtggcagcagggcaatgtgttcagctgctccgtcatgcacgaagcactgcacaaccattacactcagaagtccctgtccctgtcacctggc

SEQ ID NO: 160 - protein, 694 aa, Artificial Sequence
  Clone No. 18524
QVQLKESGPGLVAPSQSLSITCTVSGFSLTTYAISWVRQPPGKGLEWLGIIWPGGGTNYNSALKSRLSISKDNSRSQVFLKMNSLQTDDTARYYCARGAGTWYFDVWGAGTTVTVSSASTKGPSVFPLAPSSKSTSGGTAALGCLVKDYFPEPVTVSWNSGALTSGVHTFPAVLQSSGLYSLSSVVTVPSSSLGTQTYICNVNHKPSNTKVDKKVEPKSCDKTHTCPPCPAPEAAGGPSVFLFPPKPKDTLMISRTPEVTCVVVSVSHEDPEVKFNWYVDGVEVHNAKTKPREEQYNSTYRVVSVLTVLHQDWLNGKEYKCKVSNKALPAPIEKTISKAKGQPREPQVYVYPPSRDELTKNQVSLTCLVKGFYPSDIAVEWESNGQPENNYKTTPPVLDSDGSFALVSKLTVDKSRWQQGNVFSCSVMHEALHNHYTQKSLSLSPGGGGGQVQLVQSGAEVVKPGASVKISCKASGYTFTGYFMNWVKQSPGQSLEWIGRIHPYDGDTFYNQKFQGKATLTVDKSSNTAHMELLSLTSEDFAVYYCTRYDGSRAMDYWGQGTTVTVSSGGGGSGGGGSGGGGSDIVLTQSPLSLAVSLGQPAIISCKASQSVSFAGTSLMHWYHQKPGQQPRLLIYRASNLEAGVPDRFSGSGSKTDFTLTISPVEAEDAATYYCQQSREYPYTFGGGTKLEIK

SEQ ID NO: 161 - DNA, 2082 bp, Artificial Sequence
  Clone No. 18524
caggtgcagctgaaggagtccggaccaggactggtggccccctctcagagcctgtccatcacctgcacagtgagcggcttttccctgaccacatacgcaatctcttgggtgcggcagccacctggcaagggactggagtggctgggaatcatctggccaggaggaggcacaaactataattctgccctgaagagcaggctgtctatcagcaaggacaactcccgctctcaggtgttcctgaagatgaacagcctgcagaccgacgatacagcaaggtactattgtgcccggggggcagggacctggtactttgacgtgtggggggcagggaccacagtgacagtgagctccgctagcacaaagggcccaagcgtgtttcctctggccccatcctctaagagcacctccggaggaacagccgccctgggctgtctggtgaaggactacttccctgagccagtgaccgtgtcctggaactctggggccctgaccagcggagtgcacacatttcccgccgtgctgcagagctccggactgtactccctgtctagcgtggtgaccgtgccttcctctagcctgggcacccagacatatatctgcaacgtgaatcacaagccttctaatacaaaggtcgacaagaaggtggagccaaagagctgtgataagacccacacatgcccaccttgtccggcgccagaggccgccggaggaccaagcgtgttcctgtttccacccaagcccaaggacaccctgatgatctccaggacccctgaggtgacatgcgtggtggtgtctgtgagccacgaggacccagaggtgaagttcaactggtacgtggatggcgtggaggtgcacaatgccaagacaaagcccagagaggagcagtacaattccacctatcgcgtggtgtctgtgctgacagtgctgcaccaggattggctgaacggcaaggagtataagtgcaaggtgtccaataaggccctgccagcccccatcgagaagaccatctctaaggccaagggccagcctcgcgaacctcaggtgtacgtgtatcctccaagcagagacgagctgaccaagaaccaggtgtccctgacatgtctggtgaagggcttttacccctctgatatcgccgtggagtgggagagcaatggccagcctgagaacaattataagaccacaccccctgtgctggacagcgatggctccttcgccctggtgagcaagctgaccgtggacaagtccaggtggcagcagggcaacgtgttttcctgctctgtgatgcacgaggccctgcacaatcactacacacagaagagcctgagcttaagcccaggaggaggaggaggacaggtgcagctggtgcagagcggagccgaggtggtgaagcctggggccagcgtgaagatcagctgcaaggcctccggctacaccttcacaggctacttcatgaactgggtgaagcagtctcctggccagagcctggagtggatcggcagaatccacccatacgacggcgataccttctataaccagaagtttcagggcaaggccaccctgacagtggacaagagctccaataccgcccacatggagctgctgtccctgacatctgaggatttcgccgtgtactattgcacccggtacgacggctccagagccatggattattggggccagggcaccacagtgacagtgtctagcggaggaggaggctccggaggaggaggctctggcggcggcggcagcgacatcgtgctgacccagagcccactgtccctggccgtgtccctgggccagcccgccatcatctcttgtaaggcctcccagagcgtgagcttcgccgggaccagcctgatgcactggtaccaccagaagcccggccagcagcccagactgctgatctatagggcctccaatctggaggccggagtgccagaccggttctccggctctggcagcaagaccgacttcaccctgacaatcagccctgtggaggcagaggatgcagcaacatactattgtcagcagtccagggagtacccatatacctttggcggcggcacaaagctggagatcaag

SEQ ID NO: 162 - protein, 696 aa, Artificial Sequence
  Clone No. 18552
QVQLKESGPGLVAPSQSLSITCTVSGFSLTTYAISWVRQPPGKGLEWLGIIWPGGGTNYNSALKSRLSISKDNSRSQVFLKMNSLQTDDTARYYCARGAGTWYFDVWGAGTTVTVSSASTKGPSVFPLAPSSKSTSGGTAALGCLVKDYFPEPVTVSWNSGALTSGVHTFPAVLQSSGLYSLSSVVTVPSSSLGTQTYICNVNHKPSNTKVDKKVEPKSCDKTHTCPPCPAPEAAGGPSVFLFPPKPKDTLMISRTPEVTCVVVSVSHEDPEVKFNWYVDGVEVHNAKTKPREEQYNSTYRVVSVLTVLHQDWLNGKEYKCKVSNKALPAPIEKTISKAKGQPREPQVYVYPPSRDELTKNQVSLTCLVKGFYPSDIAVEWESNGQPENNYKTTPPVLDSDGSFALVSKLTVDKSRWQQGNVFSCSVMHEALHNHYTQKSLSLSPGGGGGDIVMTQTPASVEAAVGGTVTIKCQASQSIYSSLAWYQQKPGQSPKLLIYDASHLASGVPSRFSGSRYGTEFTLTISGVQCDDAATYYCQGGWYSSAATYVPNTFGGGTEVVVKGGGGSGGGGSGGGGSQEQLVESGGGLVQPEGSLTLTCKASGFTISNNYYMCWVRQAPGKGLEWIACIYGGISGRTYYASWAKGRFTISKTSSTTVTLQMTSLTAADTATYFCVRGYVGTSNLWGPGTLVTVSS

SEQ ID NO: 163 - DNA, 2088 bp, Artificial Sequence
  Clone No. 18552
caggtgcagctgaaggagtccggaccaggactggtggccccctctcagagcctgtccatcacctgcacagtgagcggcttttccctgaccacatacgcaatctcttgggtgcggcagccacctggcaagggactggagtggctgggaatcatctggccaggaggaggcacaaactataattctgccctgaagagcaggctgtctatcagcaaggacaactcccgctctcaggtgttcctgaagatgaacagcctgcagaccgacgatacagcaaggtactattgtgcccggggggcagggacctggtactttgacgtgtggggggcagggaccacagtgacagtgagctccgctagcacaaagggcccctccgtgtttcctctggccccatcctctaagtccacctctggaggaacagccgccctgggctgtctggtgaaggattacttccctgagccagtgaccgtgtcctggaactctggggccctgaccagcggagtgcacacatttcccgccgtgctgcagagctccggactgtactccctgtctagcgtggtgaccgtgccttcctctagcctgggcacccagacatatatctgcaacgtgaatcacaagccttccaatacaaaggtcgacaagaaggtggagccaaagtcttgtgataagacccacacatgcccaccttgtccggcgccagaggccgccggaggaccaagcgtgttcctgtttccacccaagcccaaggacaccctgatgatctcccggaccccagaggtgacatgcgtggtggtgagcgtgtcccacgaggaccccgaggtgaagtttaactggtacgtggatggcgtggaggtgcacaatgccaagacaaagccccgggaggagcagtacaattctacctatagagtggtgagcgtgctgacagtgctgcaccaggattggctgaacggcaaggagtataagtgtaaggtgagcaataaggccctgccagcccccatcgagaagaccatctccaaggccaagggccagcctcgcgagccacaggtgtacgtgtatccccctagcagggacgagctgacaaagaaccaggtgtccctgacctgcctggtgaagggcttctacccctccgatatcgccgtggagtgggagtctaatggccagcctgagaacaattataagaccacaccacccgtgctggactctgatggcagcttcgccctggtgagcaagctgacagtggacaagtccagatggcagcagggcaacgtgttttcttgcagcgtgatgcacgaggccctgcacaatcactacacccagaagtccctgtctctgagcccaggaggaggaggaggcgatatcgtgatgacccagacacccgcctccgtggaggccgccgtgggaggaaccgtgacaatcaagtgtcaggcctcccagtctatctacagctccctggcctggtatcagcagaagcctggccagagcccaaagctgctgatctacgacgcctcccacctggcctctggagtgccaagccggttcagcggctccagatatggcacagagtttaccctgacaatctccggagtgcagtgcgacgatgcagcaacctactattgtcagggaggatggtactctagcgccgccacctatgtgcctaacacattcggcggcggcaccgaggtggtggtgaagggaggaggaggctccggcggaggaggctctggcggcggcggcagccaggagcagctggtggagtctggaggaggactggtgcagcctgagggcagcctgaccctgacatgcaaggcctccggctttaccatctctaacaattactatatgtgctgggtgcggcaggccccaggcaagggactggagtggatcgcctgcatctacggcggcatctctggcaggacatactatgccagctgggccaagggccgcttcaccatctccaagacatcctctaccacagtgaccctgcagatgacctctctgacagccgccgataccgccacatacttttgcgtgcggggctatgtgggcaccagcaatctgtggggccctggcaccctggtgacagtgagctcc

SEQ ID NO: 164 - protein, 697 aa, Artificial Sequence
  Clone No. 18553
QVQLKQSGPGLVQPSQSLSITCTVSGFSLTSYGVHWVRQSPGKGLEWLGVIWSGGSTDYNAAFISRLSISKDNSKSQVFFKMNSLQADDTAIYYCARNPLTATVMDYWGQGTSVTVSSASTKGPSVFPLAPSSKSTSGGTAALGCLVKDYFPEPVTVSWNSGALTSGVHTFPAVLQSSGLYSLSSVVTVPSSSLGTQTYICNVNHKPSNTKVDKKVEPKSCDKTHTCPPCPAPEAAGGPSVFLFPPKPKDTLMISRTPEVTCVVVSVSHEDPEVKFNWYVDGVEVHNAKTKPREEQYNSTYRVVSVLTVLHQDWLNGKEYKCKVSNKALPAPIEKTISKAKGQPREPQVYVYPPSRDELTKNQVSLTCLVKGFYPSDIAVEWESNGQPENNYKTTPPVLDSDGSFALVSKLTVDKSRWQQGNVFSCSVMHEALHNHYTQKSLSLSPGGGGGDIVMTQTPASVEAAVGGTVTIKCQASQSIYSSLAWYQQKPGQSPKLLIYDASHLASGVPSRFSGSRYGTEFTLTISGVQCDDAATYYCQGGWYSSAATYVPNTFGGGTEVVVKGGGGSGGGGSGGGGSQEQLVESGGGLVQPEGSLTLTCKASGFTISNNYYMCWVRQAPGKGLEWIACIYGGISGRTYYASWAKGRFTISKTSSTTVTLQMTSLTAADTATYFCVRGYVGTSNLWGPGTLVTVSS

SEQ ID NO: 165 - DNA, 2091 bp, Artificial Sequence
  Clone No. 18553
caggtgcagctgaagcagtccggaccaggactggtgcagccttctcagagcctgtccatcacctgcacagtgagcggcttctccctgacctcttacggcgtgcactgggtgaggcagtctcctggcaagggactggagtggctgggcgtgatctggagcggaggctccacagactataacgccgcctttatctctcgcctgtctatcagcaaggataactccaagtctcaggtgttctttaagatgaatagcctgcaggccgacgatacagccatctactattgtgcccggaatcccctgaccgccacagtgatggactactggggccagggcaccagcgtgacagtgagctccgctagcacaaagggcccctccgtgtttcctctggccccatcctctaagtccacctctggaggaacagccgccctgggctgtctggtgaaggattacttccctgagccagtgaccgtgtcctggaactctggggccctgaccagcggagtgcacacatttcccgccgtgctgcagagctccggactgtactccctgtctagcgtggtgaccgtgccttcctctagcctgggcacccagacatatatctgcaacgtgaatcacaagccttccaatacaaaggtcgacaagaaggtggagccaaagtcttgtgataagacccacacatgcccaccttgtccggcgccagaggccgccggaggaccaagcgtgttcctgtttccacccaagcccaaggacaccctgatgatctcccggaccccagaggtgacatgcgtggtggtgagcgtgtcccacgaggaccccgaggtgaagtttaactggtacgtggatggcgtggaggtgcacaatgccaagacaaagccccgggaggagcagtacaattctacctatagagtggtgagcgtgctgacagtgctgcaccaggattggctgaacggcaaggagtataagtgtaaggtgagcaataaggccctgccagcccccatcgagaagaccatctccaaggccaagggccagcctcgcgagccacaggtgtacgtgtatccccctagcagggacgagctgacaaagaaccaggtgtccctgacctgcctggtgaagggcttctacccctccgatatcgccgtggagtgggagtctaatggccagcctgagaacaattataagaccacaccacccgtgctggactctgatggcagcttcgccctggtgagcaagctgacagtggacaagtccagatggcagcagggcaacgtgttttcttgcagcgtgatgcacgaggccctgcacaatcactacacccagaagtccctgtctctgagcccaggaggaggaggaggcgatatcgtgatgacccagacacccgcctccgtggaggccgccgtgggaggaaccgtgacaatcaagtgtcaggcctcccagtctatctacagctccctggcctggtatcagcagaagcctggccagagcccaaagctgctgatctacgacgcctcccacctggcctctggagtgccaagccggttcagcggctccagatatggcacagagtttaccctgacaatctccggagtgcagtgcgacgatgcagcaacctactattgtcagggaggatggtactctagcgccgccacctatgtgcctaacacattcggcggcggcaccgaggtggtggtgaagggaggaggaggctccggcggaggaggctctggcggcggcggcagccaggagcagctggtggagtctggaggaggactggtgcagcctgagggcagcctgaccctgacatgcaaggcctccggctttaccatctctaacaattactatatgtgctgggtgcggcaggccccaggcaagggactggagtggatcgcctgcatctacggcggcatctctggcaggacatactatgccagctgggccaagggccgcttcaccatctccaagacatcctctaccacagtgaccctgcagatgacctctctgacagccgccgataccgccacatacttttgcgtgcggggctatgtgggcaccagcaatctgtggggccctggcaccctggtgacagtgagctcc

SEQ ID NO: 166 - protein, 696 aa, Artificial Sequence
  Clone No. 18554
QVQLKESGPGLVAPSQSLSITCTVSGFSLTSYAINWVRQPPGKGLEWLGVLWPGGGTNYNSALKSRLSISKDNSKSQVFLKMNSLQTDDTARYYCARGSGTWYFDVWGAGTTVTVSSASTKGPSVFPLAPSSKSTSGGTAALGCLVKDYFPEPVTVSWNSGALTSGVHTFPAVLQSSGLYSLSSVVTVPSSSLGTQTYICNVNHKPSNTKVDKKVEPKSCDKTHTCPPCPAPEAAGGPSVFLFPPKPKDTLMISRTPEVTCVVVSVSHEDPEVKFNWYVDGVEVHNAKTKPREEQYNSTYRVVSVLTVLHQDWLNGKEYKCKVSNKALPAPIEKTISKAKGQPREPQVYVYPPSRDELTKNQVSLTCLVKGFYPSDIAVEWESNGQPENNYKTTPPVLDSDGSFALVSKLTVDKSRWQQGNVFSCSVMHEALHNHYTQKSLSLSPGGGGGDIVMTQTPASVEAAVGGTVTIKCQASQSIYSSLAWYQQKPGQSPKLLIYDASHLASGVPSRFSGSRYGTEFTLTISGVQCDDAATYYCQGGWYSSAATYVPNTFGGGTEVVVKGGGGSGGGGSGGGGSQEQLVESGGGLVQPEGSLTLTCKASGFTISNNYYMCWVRQAPGKGLEWIACIYGGISGRTYYASWAKGRFTISKTSSTTVTLQMTSLTAADTATYFCVRGYVGTSNLWGPGTLVTVSS

SEQ ID NO: 167 - DNA, 2088 bp, Artificial Sequence
  Clone No. 18554
caggtgcagctgaaggagagcggaccaggactggtggccccctctcagagcctgtccatcacctgcacagtgagcggcttttccctgacctcttacgccatcaactgggtgcggcagccacctggcaagggactggagtggctgggcgtgctgtggccaggaggaggcacaaactataatagcgccctgaagtccaggctgtctatcagcaaggacaactccaagtctcaggtgttcctgaagatgaacagcctgcagaccgacgatacagcccggtactattgtgccagaggctccggcacctggtactttgacgtgtggggggcagggaccacagtgacagtgagctccgctagcacaaagggcccctccgtgtttcctctggccccatcctctaagtccacctctggaggaacagccgccctgggctgtctggtgaaggattacttccctgagccagtgaccgtgtcctggaactctggggccctgaccagcggagtgcacacatttcccgccgtgctgcagagctccggactgtactccctgtctagcgtggtgaccgtgccttcctctagcctgggcacccagacatatatctgcaacgtgaatcacaagccttccaatacaaaggtcgacaagaaggtggagccaaagtcttgtgataagacccacacatgcccaccttgtccggcgccagaggccgccggaggaccaagcgtgttcctgtttccacccaagcccaaggacaccctgatgatctcccggaccccagaggtgacatgcgtggtggtgagcgtgtcccacgaggaccccgaggtgaagtttaactggtacgtggatggcgtggaggtgcacaatgccaagacaaagccccgggaggagcagtacaattctacctatagagtggtgagcgtgctgacagtgctgcaccaggattggctgaacggcaaggagtataagtgtaaggtgagcaataaggccctgccagcccccatcgagaagaccatctccaaggccaagggccagcctcgcgagccacaggtgtacgtgtatccccctagcagggacgagctgacaaagaaccaggtgtccctgacctgcctggtgaagggcttctacccctccgatatcgccgtggagtgggagtctaatggccagcctgagaacaattataagaccacaccacccgtgctggactctgatggcagcttcgccctggtgagcaagctgacagtggacaagtccagatggcagcagggcaacgtgttttcttgcagcgtgatgcacgaggccctgcacaatcactacacccagaagtccctgtctctgagcccaggaggaggaggaggcgatatcgtgatgacccagacacccgcctccgtggaggccgccgtgggaggaaccgtgacaatcaagtgtcaggcctcccagtctatctacagctccctggcctggtatcagcagaagcctggccagagcccaaagctgctgatctacgacgcctcccacctggcctctggagtgccaagccggttcagcggctccagatatggcacagagtttaccctgacaatctccggagtgcagtgcgacgatgcagcaacctactattgtcagggaggatggtactctagcgccgccacctatgtgcctaacacattcggcggcggcaccgaggtggtggtgaagggaggaggaggctccggcggaggaggctctggcggcggcggcagccaggagcagctggtggagtctggaggaggactggtgcagcctgagggcagcctgaccctgacatgcaaggcctccggctttaccatctctaacaattactatatgtgctgggtgcggcaggccccaggcaagggactggagtggatcgcctgcatctacggcggcatctctggcaggacatactatgccagctgggccaagggccgcttcaccatctccaagacatcctctaccacagtgaccctgcagatgacctctctgacagccgccgataccgccacatacttttgcgtgcggggctatgtgggcaccagcaatctgtggggccctggcaccctggtgacagtgagctcc

SEQ ID NO: 168 - protein, 697 aa, Artificial Sequence
  Clone No. 18555
QVQLQESGPGLVQPTQSLSITCTVSGFSLISYGVHWVRQSPGKGLEWLGVIWSGGSTDYNAAFISRLSISKDNSKSQVFFKMNSLQADDTAIYYCARNPLTATVMDYWGQGTSVTVSSASTKGPSVFPLAPSSKSTSGGTAALGCLVKDYFPEPVTVSWNSGALTSGVHTFPAVLQSSGLYSLSSVVTVPSSSLGTQTYICNVNHKPSNTKVDKKVEPKSCDKTHTCPPCPAPEAAGGPSVFLFPPKPKDTLMISRTPEVTCVVVSVSHEDPEVKFNWYVDGVEVHNAKTKPREEQYNSTYRVVSVLTVLHQDWLNGKEYKCKVSNKALPAPIEKTISKAKGQPREPQVYVYPPSRDELTKNQVSLTCLVKGFYPSDIAVEWESNGQPENNYKTTPPVLDSDGSFALVSKLTVDKSRWQQGNVFSCSVMHEALHNHYTQKSLSLSPGGGGGDIVMTQTPASVEAAVGGTVTIKCQASQSIYSSLAWYQQKPGQSPKLLIYDASHLASGVPSRFSGSRYGTEFTLTISGVQCDDAATYYCQGGWYSSAATYVPNTFGGGTEVVVKGGGGSGGGGSGGGGSQEQLVESGGGLVQPEGSLTLTCKASGFTISNNYYMCWVRQAPGKGLEWIACIYGGISGRTYYASWAKGRFTISKTSSTTVTLQMTSLTAADTATYFCVRGYVGTSNLWGPGTLVTVSS

SEQ ID NO: 169 - DNA, 2091 bp, Artificial Sequence
  Clone No. 18555
caggtgcagctgcaggagagcggaccaggactggtgcagcctacacagtctctgagcatcacctgcacagtgtctggcttcagcctgatctcctacggagtgcactgggtgaggcagtcccctggcaagggactggagtggctgggcgtgatctggtctggcggcagcaccgactataacgccgcctttatctcccgcctgtccatctctaaggataacagcaagtcccaggtgttctttaagatgaacagcctgcaggccgacgatacagccatctactattgtgcccggaatcccctgaccgccacagtgatggactactggggccagggcacctctgtgacagtgagctccgctagcacaaagggcccctccgtgtttcctctggccccatcctctaagtccacctctggaggaacagccgccctgggctgtctggtgaaggattacttccctgagccagtgaccgtgtcctggaactctggggccctgaccagcggagtgcacacatttcccgccgtgctgcagagctccggactgtactccctgtctagcgtggtgaccgtgccttcctctagcctgggcacccagacatatatctgcaacgtgaatcacaagccttccaatacaaaggtcgacaagaaggtggagccaaagtcttgtgataagacccacacatgcccaccttgtccggcgccagaggccgccggaggaccaagcgtgttcctgtttccacccaagcccaaggacaccctgatgatctcccggaccccagaggtgacatgcgtggtggtgagcgtgtcccacgaggaccccgaggtgaagtttaactggtacgtggatggcgtggaggtgcacaatgccaagacaaagccccgggaggagcagtacaattctacctatagagtggtgagcgtgctgacagtgctgcaccaggattggctgaacggcaaggagtataagtgtaaggtgagcaataaggccctgccagcccccatcgagaagaccatctccaaggccaagggccagcctcgcgagccacaggtgtacgtgtatccccctagcagggacgagctgacaaagaaccaggtgtccctgacctgcctggtgaagggcttctacccctccgatatcgccgtggagtgggagtctaatggccagcctgagaacaattataagaccacaccacccgtgctggactctgatggcagcttcgccctggtgagcaagctgacagtggacaagtccagatggcagcagggcaacgtgttttcttgcagcgtgatgcacgaggccctgcacaatcactacacccagaagtccctgtctctgagcccaggaggaggaggaggcgatatcgtgatgacccagacacccgcctccgtggaggccgccgtgggaggaaccgtgacaatcaagtgtcaggcctcccagtctatctacagctccctggcctggtatcagcagaagcctggccagagcccaaagctgctgatctacgacgcctcccacctggcctctggagtgccaagccggttcagcggctccagatatggcacagagtttaccctgacaatctccggagtgcagtgcgacgatgcagcaacctactattgtcagggaggatggtactctagcgccgccacctatgtgcctaacacattcggcggcggcaccgaggtggtggtgaagggaggaggaggctccggcggaggaggctctggcggcggcggcagccaggagcagctggtggagtctggaggaggactggtgcagcctgagggcagcctgaccctgacatgcaaggcctccggctttaccatctctaacaattactatatgtgctgggtgcggcaggccccaggcaagggactggagtggatcgcctgcatctacggcggcatctctggcaggacatactatgccagctgggccaagggccgcttcaccatctccaagacatcctctaccacagtgaccctgcagatgacctctctgacagccgccgataccgccacatacttttgcgtgcggggctatgtgggcaccagcaatctgtggggccctggcaccctggtgacagtgagctcc

SEQ ID NO: 170 - protein, 480 aa, Artificial Sequence
  Clone No. 5244
DIQMTQSPSSLSASVGDRVTITCRASQDVNTAVAWYQQKPGKAPKLLIYSASFLYSGVPSRFSGSRSGTDFTLTISSLQPEDFATYYCQQHYTTPPTFGQGTKVEIKGGSGGGSGGGSGGGSGGGSGEVQLVESGGGLVQPGGSLRLSCAASGFNIKDTYIHWVRQAPGKGLEWVARIYPTNGYTRYADSVKGRFTISADTSKNTAYLQMNSLRAEDTAVYYCSRWGGDGFYAMDYWGQGTLVTVSSAAEPKSSDKTHTCPPCPAPELLGGPSVFLFPPKPKDTLMISRTPEVTCVVVDVSHEDPEVKFNWYVDGVEVHNAKTKPREEQYNSTYRVVSVLTVLHQDWLNGKEYKCKVSNKALPAPIEKTISKAKGQPREPQVYVLPPSRDELTKNQVSLLCLVKGFYPSDIAVEWESNGQPENNYLTWPPVLDSDGSFFLYSKLTVDKSRWQQGNVFSCSVMHEALHNHYTQKSLSLSPG

SEQ ID NO: 171 - DNA, 1440 bp, Artificial Sequence
  Clone No. 5244
gacattcagatgacacagagccccagctccctgagtgcttcagtcggcgacagggtgactatcacctgccgcgcatcccaggatgtcaacaccgctgtggcatggtaccagcagaagcctggaaaagccccaaagctgctgatctacagcgcttccttcctgtattctggcgtgccaagtcggttttctggaagtagatcaggcactgacttcacactgactatctctagtctgcagcccgaagattttgccacctactattgccagcagcactataccacaccccctacattcggacagggcactaaagtggagattaagggcgggtcaggcggagggagcggaggagggtccggaggagggtctggaggagggagtggagaggtccagctggtggaatctggaggaggactggtgcagcctggaggctcactgcgactgagctgtgccgcttccggctttaacatcaaagacacatacattcattgggtcaggcaggcaccagggaagggactggaatgggtggcccgcatctatcccacaaatgggtacactcgatatgccgacagcgtgaaaggacggtttaccatttctgctgataccagtaagaacacagcatacctgcagatgaacagcctgcgcgcagaggatacagccgtgtactattgcagtcgatgggggggagacggcttctacgccatggattattggggccaggggactctggtcaccgtgtcaagcgcagccgaacctaaatcctctgacaagacccacacatgcccaccctgtcctgctccagagctgctgggaggaccatccgtgttcctgtttcctccaaagcctaaagatacactgatgattagccgcactcccgaagtcacctgtgtggtcgtggacgtgtcccacgaggaccccgaagtcaagttcaactggtacgtggacggcgtcgaggtgcataatgccaagactaaaccaagagaggaacagtacaattcaacctatagggtcgtgagcgtcctgacagtgctgcatcaggattggctgaacggcaaggagtataagtgcaaagtgtctaacaaggccctgcccgctcctatcgagaagactattagcaaggcaaaagggcagccacgggaaccccaggtctacgtgctgccccctagcagagacgagctgaccaaaaaccaggtctccctgctgtgtctggtgaagggcttttatcctagtgatatcgctgtggagtgggaatcaaatgggcagccagaaaacaattacctgacatggccacccgtgctggacagcgatgggtccttctttctgtattccaaactgactgtggacaagtctagatggcagcagggaaacgtcttcagctgttccgtgatgcacgaggccctgcacaatcattacacccagaagtctctgagtctgtcacccggc

SEQ ID NO: 172 - protein, 695 aa, Artificial Sequence
  Clone No. 18557
QVQLKESGPGLVAPSQSLSITCTVSGFSLTTYAISWVRQPPGKGLEWLGIIWPGGGTNYNSALKSRLSISKDNSRSQVFLKMNSLQTDDTARYYCARGAGTWYFDVWGAGTTVTVSSASTKGPSVFPLAPSSKSTSGGTAALGCLVKDYFPEPVTVSWNSGALTSGVHTFPAVLQSSGLYSLSSVVTVPSSSLGTQTYICNVNHKPSNTKVDKKVEPKSCDKTHTCPPCPAPEAAGGPSVFLFPPKPKDTLMISRTPEVTCVVVSVSHEDPEVKFNWYVDGVEVHNAKTKPREEQYNSTYRVVSVLTVLHQDWLNGKEYKCKVSNKALPAPIEKTISKAKGQPREPQVYVYPPSRDELTKNQVSLTCLVKGFYPSDIAVEWESNGQPENNYKTTPPVLDSDGSFALVSKLTVDKSRWQQGNVFSCSVMHEALHNHYTQKSLSLSPGGGGGDIVMTQTPSSVSAAVGGTVTIKCQASQTIGSSLAWYQQKPGQPPKLLIYRASTLASGVSSRFRGSGSGTEYTLTISDLECADAATYYCQWTDYGYIYIWAFGGGTEVVVKGGGGSGGGGSGGGGSQEQLVESGGGLVQPEGSLTLTCTASKFSFSSLYYMCWVRQAPGKGLEWIACVYGGSSGNTYYASWAKGRFTISKASSTTVTLQLTSLTAADTATYFCARFDVDGSGFNLWGPGTLVTVSS

SEQ ID NO: 173 - DNA, 2085 bp, Artificial Sequence
  Clone No. 18557
caggtgcagctgaaggagtccggaccaggactggtggccccctctcagagcctgtccatcacctgcacagtgagcggcttttccctgaccacatacgcaatctcttgggtgcggcagccacctggcaagggactggagtggctgggaatcatctggccaggaggaggcacaaactataattctgccctgaagagcaggctgtctatcagcaaggacaactcccgctctcaggtgttcctgaagatgaacagcctgcagaccgacgatacagcaaggtactattgtgcccggggggcagggacctggtactttgacgtgtggggggcagggaccacagtgacagtgagctccgctagcacaaagggcccctccgtgtttcctctggccccatcctctaagtccacctctggaggaacagccgccctgggctgtctggtgaaggattacttccctgagccagtgaccgtgtcctggaactctggggccctgaccagcggagtgcacacatttcccgccgtgctgcagagctccggactgtactccctgtctagcgtggtgaccgtgccttcctctagcctgggcacccagacatatatctgcaacgtgaatcacaagccttccaatacaaaggtcgacaagaaggtggagccaaagtcttgtgataagacccacacatgcccaccttgtccggcgccagaggccgccggaggaccaagcgtgttcctgtttccacccaagcccaaggacaccctgatgatctcccggaccccagaggtgacatgcgtggtggtgagcgtgtcccacgaggaccccgaggtgaagtttaactggtacgtggatggcgtggaggtgcacaatgccaagacaaagccccgggaggagcagtacaattctacctatagagtggtgagcgtgctgacagtgctgcaccaggattggctgaacggcaaggagtataagtgtaaggtgagcaataaggccctgccagcccccatcgagaagaccatctccaaggccaagggccagcctcgcgagccccaggtgtacgtgtatccccctagcagagacgagctgacaaagaaccaggtgtccctgacctgcctggtgaagggcttctatccctctgatatcgccgtggagtgggagagcaatggccagcctgagaacaattacaagaccacaccacccgtgctggacagcgatggctccttcgccctggtgagcaagctgacagtggacaagtccaggtggcagcagggcaacgtgttttcttgcagcgtgatgcacgaggccctgcacaatcactatacccagaagtccctgtctctgagcccaggaggaggaggaggcgatatcgtgatgacccagacaccaagctccgtgagcgccgccgtgggaggaaccgtgacaatcaagtgtcaggcctcccagaccatcggctctagcctggcctggtatcagcagaagcctggccagcctccaaagctgctgatctacagagcctccacactggcctctggcgtgtcctctcggttcagaggctccggctctggcaccgagtacaccctgacaatcagcgacctggagtgcgcagatgcagcaacatactattgtcagtggaccgactacggctatatctacatctgggcctttggcggaggaaccgaggtggtggtgaagggaggaggaggcagcggcggcggaggctccggcggcggcggctctcaggagcagctggtggagtctggaggaggactggtgcagcctgagggctccctgaccctgacatgcaccgcctctaagttcagctttagctccctgtactatatgtgctgggtgaggcaggccccaggcaagggactggagtggatcgcctgcgtgtatggcggctctagcggcaacacctactatgcctcctgggccaagggccgcttcacaatctctaaggcctcctctaccacagtgaccctgcagctgacaagcctgaccgccgccgatacagccacctacttctgtgcccggtttgacgtggatggctccggctttaatctgtggggaccaggcacactggtgaccgtgagctcc

SEQ ID NO: 174 - protein, 696 aa, Artificial Sequence
  Clone No. 18558
QVQLKQSGPGLVQPSQSLSITCTVSGFSLTSYGVHWVRQSPGKGLEWLGVIWSGGSTDYNAAFISRLSISKDNSKSQVFFKMNSLQADDTAIYYCARNPLTATVMDYWGQGTSVTVSSASTKGPSVFPLAPSSKSTSGGTAALGCLVKDYFPEPVTVSWNSGALTSGVHTFPAVLQSSGLYSLSSVVTVPSSSLGTQTYICNVNHKPSNTKVDKKVEPKSCDKTHTCPPCPAPEAAGGPSVFLFPPKPKDTLMISRTPEVTCVVVSVSHEDPEVKFNWYVDGVEVHNAKTKPREEQYNSTYRVVSVLTVLHQDWLNGKEYKCKVSNKALPAPIEKTISKAKGQPREPQVYVYPPSRDELTKNQVSLTCLVKGFYPSDIAVEWESNGQPENNYKTTPPVLDSDGSFALVSKLTVDKSRWQQGNVFSCSVMHEALHNHYTQKSLSLSPGGGGGDIVMTQTPSSVSAAVGGTVTIKCQASQTIGSSLAWYQQKPGQPPKLLIYRASTLASGVSSRFRGSGSGTEYTLTISDLECADAATYYCQWTDYGYIYIWAFGGGTEVVVKGGGGSGGGGSGGGGSQEQLVESGGGLVQPEGSLTLTCTASKFSFSSLYYMCWVRQAPGKGLEWIACVYGGSSGNTYYASWAKGRFTISKASSTTVTLQLTSLTAADTATYFCARFDVDGSGFNLWGPGTLVTVSS

SEQ ID NO: 175 - DNA, 2088 bp, Artificial Sequence
  Clone No. 18558
caggtgcagctgaagcagtccggaccaggactggtgcagccttctcagagcctgtccatcacctgcacagtgagcggcttctccctgacctcttacggcgtgcactgggtgaggcagtctcctggcaagggactggagtggctgggcgtgatctggagcggaggctccacagactataacgccgcctttatctctcgcctgtctatcagcaaggataactccaagtctcaggtgttctttaagatgaatagcctgcaggccgacgatacagccatctactattgtgcccggaatcccctgaccgccacagtgatggactactggggccagggcaccagcgtgacagtgagctccgctagcacaaagggcccctccgtgtttcctctggccccatcctctaagtccacctctggaggaacagccgccctgggctgtctggtgaaggattacttccctgagccagtgaccgtgtcctggaactctggggccctgaccagcggagtgcacacatttcccgccgtgctgcagagctccggactgtactccctgtctagcgtggtgaccgtgccttcctctagcctgggcacccagacatatatctgcaacgtgaatcacaagccttccaatacaaaggtcgacaagaaggtggagccaaagtcttgtgataagacccacacatgcccaccttgtccggcgccagaggccgccggaggaccaagcgtgttcctgtttccacccaagcccaaggacaccctgatgatctcccggaccccagaggtgacatgcgtggtggtgagcgtgtcccacgaggaccccgaggtgaagtttaactggtacgtggatggcgtggaggtgcacaatgccaagacaaagccccgggaggagcagtacaattctacctatagagtggtgagcgtgctgacagtgctgcaccaggattggctgaacggcaaggagtataagtgtaaggtgagcaataaggccctgccagcccccatcgagaagaccatctccaaggccaagggccagcctcgcgagccccaggtgtacgtgtatccccctagcagagacgagctgacaaagaaccaggtgtccctgacctgcctggtgaagggcttctatccctctgatatcgccgtggagtgggagagcaatggccagcctgagaacaattacaagaccacaccacccgtgctggacagcgatggctccttcgccctggtgagcaagctgacagtggacaagtccaggtggcagcagggcaacgtgttttcttgcagcgtgatgcacgaggccctgcacaatcactatacccagaagtccctgtctctgagcccaggaggaggaggaggcgatatcgtgatgacccagacaccaagctccgtgagcgccgccgtgggaggaaccgtgacaatcaagtgtcaggcctcccagaccatcggctctagcctggcctggtatcagcagaagcctggccagcctccaaagctgctgatctacagagcctccacactggcctctggcgtgtcctctcggttcagaggctccggctctggcaccgagtacaccctgacaatcagcgacctggagtgcgcagatgcagcaacatactattgtcagtggaccgactacggctatatctacatctgggcctttggcggaggaaccgaggtggtggtgaagggaggaggaggcagcggcggcggaggctccggcggcggcggctctcaggagcagctggtggagtctggaggaggactggtgcagcctgagggctccctgaccctgacatgcaccgcctctaagttcagctttagctccctgtactatatgtgctgggtgaggcaggccccaggcaagggactggagtggatcgcctgcgtgtatggcggctctagcggcaacacctactatgcctcctgggccaagggccgcttcacaatctctaaggcctcctctaccacagtgaccctgcagctgacaagcctgaccgccgccgatacagccacctacttctgtgcccggtttgacgtggatggctccggctttaatctgtggggaccaggcacactggtgaccgtgagctcc

SEQ ID NO: 176 - protein, 695 aa, Artificial Sequence
  Clone No. 18559
QVQLKESGPGLVAPSQSLSITCTVSGFSLTSYAINWVRQPPGKGLEWLGVLWPGGGTNYNSALKSRLSISKDNSKSQVFLKMNSLQTDDTARYYCARGSGTWYFDVWGAGTTVTVSSASTKGPSVFPLAPSSKSTSGGTAALGCLVKDYFPEPVTVSWNSGALTSGVHTFPAVLQSSGLYSLSSVVTVPSSSLGTQTYICNVNHKPSNTKVDKKVEPKSCDKTHTCPPCPAPEAAGGPSVFLFPPKPKDTLMISRTPEVTCVVVSVSHEDPEVKFNWYVDGVEVHNAKTKPREEQYNSTYRVVSVLTVLHQDWLNGKEYKCKVSNKALPAPIEKTISKAKGQPREPQVYVYPPSRDELTKNQVSLTCLVKGFYPSDIAVEWESNGQPENNYKTTPPVLDSDGSFALVSKLTVDKSRWQQGNVFSCSVMHEALHNHYTQKSLSLSPGGGGGDIVMTQTPSSVSAAVGGTVTIKCQASQTIGSSLAWYQQKPGQPPKLLIYRASTLASGVSSRFRGSGSGTEYTLTISDLECADAATYYCQWTDYGYIYIWAFGGGTEVVVKGGGGSGGGGSGGGGSQEQLVESGGGLVQPEGSLTLTCTASKFSFSSLYYMCWVRQAPGKGLEWIACVYGGSSGNTYYASWAKGRFTISKASSTTVTLQLTSLTAADTATYFCARFDVDGSGFNLWGPGTLVTVSS

SEQ ID NO: 177 - DNA, 2085 bp, Artificial Sequence
  Clone No. 18559
caggtgcagctgaaggagagcggaccaggactggtggccccctctcagagcctgtccatcacctgcacagtgagcggcttttccctgacctcttacgccatcaactgggtgcggcagccacctggcaagggactggagtggctgggcgtgctgtggccaggaggaggcacaaactataatagcgccctgaagtccaggctgtctatcagcaaggacaactccaagtctcaggtgttcctgaagatgaacagcctgcagaccgacgatacagcccggtactattgtgccagaggctccggcacctggtactttgacgtgtggggggcagggaccacagtgacagtgagctccgctagcacaaagggcccctccgtgtttcctctggccccatcctctaagtccacctctggaggaacagccgccctgggctgtctggtgaaggattacttccctgagccagtgaccgtgtcctggaactctggggccctgaccagcggagtgcacacatttcccgccgtgctgcagagctccggactgtactccctgtctagcgtggtgaccgtgccttcctctagcctgggcacccagacatatatctgcaacgtgaatcacaagccttccaatacaaaggtcgacaagaaggtggagccaaagtcttgtgataagacccacacatgcccaccttgtccggcgccagaggccgccggaggaccaagcgtgttcctgtttccacccaagcccaaggacaccctgatgatctcccggaccccagaggtgacatgcgtggtggtgagcgtgtcccacgaggaccccgaggtgaagtttaactggtacgtggatggcgtggaggtgcacaatgccaagacaaagccccgggaggagcagtacaattctacctatagagtggtgagcgtgctgacagtgctgcaccaggattggctgaacggcaaggagtataagtgtaaggtgagcaataaggccctgccagcccccatcgagaagaccatctccaaggccaagggccagcctcgcgagccccaggtgtacgtgtatccccctagcagagacgagctgacaaagaaccaggtgtccctgacctgcctggtgaagggcttctatccctctgatatcgccgtggagtgggagagcaatggccagcctgagaacaattacaagaccacaccacccgtgctggacagcgatggctccttcgccctggtgagcaagctgacagtggacaagtccaggtggcagcagggcaacgtgttttcttgcagcgtgatgcacgaggccctgcacaatcactatacccagaagtccctgtctctgagcccaggaggaggaggaggcgatatcgtgatgacccagacaccaagctccgtgagcgccgccgtgggaggaaccgtgacaatcaagtgtcaggcctcccagaccatcggctctagcctggcctggtatcagcagaagcctggccagcctccaaagctgctgatctacagagcctccacactggcctctggcgtgtcctctcggttcagaggctccggctctggcaccgagtacaccctgacaatcagcgacctggagtgcgcagatgcagcaacatactattgtcagtggaccgactacggctatatctacatctgggcctttggcggaggaaccgaggtggtggtgaagggaggaggaggcagcggcggcggaggctccggcggcggcggctctcaggagcagctggtggagtctggaggaggactggtgcagcctgagggctccctgaccctgacatgcaccgcctctaagttcagctttagctccctgtactatatgtgctgggtgaggcaggccccaggcaagggactggagtggatcgcctgcgtgtatggcggctctagcggcaacacctactatgcctcctgggccaagggccgcttcacaatctctaaggcctcctctaccacagtgaccctgcagctgacaagcctgaccgccgccgatacagccacctacttctgtgcccggtttgacgtggatggctccggctttaatctgtggggaccaggcacactggtgaccgtgagctcc

SEQ ID NO: 178 - protein, 696 aa, Artificial Sequence
  Clone No. 18560
QVQLQESGPGLVQPTQSLSITCTVSGFSLISYGVHWVRQSPGKGLEWLGVIWSGGSTDYNAAFISRLSISKDNSKSQVFFKMNSLQADDTAIYYCARNPLTATVMDYWGQGTSVTVSSASTKGPSVFPLAPSSKSTSGGTAALGCLVKDYFPEPVTVSWNSGALTSGVHTFPAVLQSSGLYSLSSVVTVPSSSLGTQTYICNVNHKPSNTKVDKKVEPKSCDKTHTCPPCPAPEAAGGPSVFLFPPKPKDTLMISRTPEVTCVVVSVSHEDPEVKFNWYVDGVEVHNAKTKPREEQYNSTYRVVSVLTVLHQDWLNGKEYKCKVSNKALPAPIEKTISKAKGQPREPQVYVYPPSRDELTKNQVSLTCLVKGFYPSDIAVEWESNGQPENNYKTTPPVLDSDGSFALVSKLTVDKSRWQQGNVFSCSVMHEALHNHYTQKSLSLSPGGGGGDIVMTQTPSSVSAAVGGTVTIKCQASQTIGSSLAWYQQKPGQPPKLLIYRASTLASGVSSRFRGSGSGTEYTLTISDLECADAATYYCQWTDYGYIYIWAFGGGTEVVVKGGGGSGGGGSGGGGSQEQLVESGGGLVQPEGSLTLTCTASKFSFSSLYYMCWVRQAPGKGLEWIACVYGGSSGNTYYASWAKGRFTISKASSTTVTLQLTSLTAADTATYFCARFDVDGSGFNLWGPGTLVTVSS

SEQ ID NO: 179 - DNA, 2088 bp, Artificial Sequence
  Clone No. 18560
caggtgcagctgcaggagagcggaccaggactggtgcagcctacacagtctctgagcatcacctgcacagtgtctggcttcagcctgatctcctacggagtgcactgggtgaggcagtcccctggcaagggactggagtggctgggcgtgatctggtctggcggcagcaccgactataacgccgcctttatctcccgcctgtccatctctaaggataacagcaagtcccaggtgttctttaagatgaacagcctgcaggccgacgatacagccatctactattgtgcccggaatcccctgaccgccacagtgatggactactggggccagggcacctctgtgacagtgagctccgctagcacaaagggcccctccgtgtttcctctggccccatcctctaagtccacctctggaggaacagccgccctgggctgtctggtgaaggattacttccctgagccagtgaccgtgtcctggaactctggggccctgaccagcggagtgcacacatttcccgccgtgctgcagagctccggactgtactccctgtctagcgtggtgaccgtgccttcctctagcctgggcacccagacatatatctgcaacgtgaatcacaagccttccaatacaaaggtcgacaagaaggtggagccaaagtcttgtgataagacccacacatgcccaccttgtccggcgccagaggccgccggaggaccaagcgtgttcctgtttccacccaagcccaaggacaccctgatgatctcccggaccccagaggtgacatgcgtggtggtgagcgtgtcccacgaggaccccgaggtgaagtttaactggtacgtggatggcgtggaggtgcacaatgccaagacaaagccccgggaggagcagtacaattctacctatagagtggtgagcgtgctgacagtgctgcaccaggattggctgaacggcaaggagtataagtgtaaggtgagcaataaggccctgccagcccccatcgagaagaccatctccaaggccaagggccagcctcgcgagccccaggtgtacgtgtatccccctagcagagacgagctgacaaagaaccaggtgtccctgacctgcctggtgaagggcttctatccctctgatatcgccgtggagtgggagagcaatggccagcctgagaacaattacaagaccacaccacccgtgctggacagcgatggctccttcgccctggtgagcaagctgacagtggacaagtccaggtggcagcagggcaacgtgttttcttgcagcgtgatgcacgaggccctgcacaatcactatacccagaagtccctgtctctgagcccaggaggaggaggaggcgatatcgtgatgacccagacaccaagctccgtgagcgccgccgtgggaggaaccgtgacaatcaagtgtcaggcctcccagaccatcggctctagcctggcctggtatcagcagaagcctggccagcctccaaagctgctgatctacagagcctccacactggcctctggcgtgtcctctcggttcagaggctccggctctggcaccgagtacaccctgacaatcagcgacctggagtgcgcagatgcagcaacatactattgtcagtggaccgactacggctatatctacatctgggcctttggcggaggaaccgaggtggtggtgaagggaggaggaggcagcggcggcggaggctccggcggcggcggctctcaggagcagctggtggagtctggaggaggactggtgcagcctgagggctccctgaccctgacatgcaccgcctctaagttcagctttagctccctgtactatatgtgctgggtgaggcaggccccaggcaagggactggagtggatcgcctgcgtgtatggcggctctagcggcaacacctactatgcctcctgggccaagggccgcttcacaatctctaaggcctcctctaccacagtgaccctgcagctgacaagcctgaccgccgccgatacagccacctacttctgtgcccggtttgacgtggatggctccggctttaatctgtggggaccaggcacactggtgaccgtgagctcc

SEQ ID NO: 180 - protein, 695 aa, Artificial Sequence
  Clone No. 18561
QVQLKESGPGLVAPSQSLSITCTVSGFSLTSYAISWVRQPPGKGLEWLGVIWPGGGTNYNSALKSRLSISKDNSKSQVFLKMNSLQTDDTARYYCARGTGTWYFDVWGAGTTVTVSSASTKGPSVFPLAPSSKSTSGGTAALGCLVKDYFPEPVTVSWNSGALTSGVHTFPAVLQSSGLYSLSSVVTVPSSSLGTQTYICNVNHKPSNTKVDKKVEPKSCDKTHTCPPCPAPEAAGGPSVFLFPPKPKDTLMISRTPEVTCVVVSVSHEDPEVKFNWYVDGVEVHNAKTKPREEQYNSTYRVVSVLTVLHQDWLNGKEYKCKVSNKALPAPIEKTISKAKGQPREPQVYVYPPSRDELTKNQVSLTCLVKGFYPSDIAVEWESNGQPENNYKTTPPVLDSDGSFALVSKLTVDKSRWQQGNVFSCSVMHEALHNHYTQKSLSLSPGGGGGDIVMTQTPSSVSAAVGGTVTIKCQASQTIGSSLAWYQQKPGQPPKLLIYRASTLASGVSSRFRGSGSGTEYTLTISDLECADAATYYCQWTDYGYIYIWAFGGGTEVVVKGGGGSGGGGSGGGGSQEQLVESGGGLVQPEGSLTLTCTASKFSFSSLYYMCWVRQAPGKGLEWIACVYGGSSGNTYYASWAKGRFTISKASSTTVTLQLTSLTAADTATYFCARFDVDGSGFNLWGPGTLVTVSS

SEQ ID NO: 181 - DNA, 2085 bp, Artificial Sequence
  Clone No. 18561
caggtgcagctgaaggagtctggaccaggactggtggccccctctcagagcctgtccatcacctgcacagtgagcggcttttccctgacctcttacgcaatctcctgggtgcggcagccacctggcaagggactggagtggctgggcgtgatctggccaggaggaggcacaaactataatagcgccctgaagtccaggctgtctatcagcaaggacaactccaagtctcaggtgttcctgaagatgaatagcctgcagaccgacgatacagcccggtactattgtgccagaggcaccggcacatggtactttgacgtgtggggggcagggaccacagtgacagtgagctccgctagcacaaagggcccctccgtgtttcctctggccccatcctctaagtccacctctggaggaacagccgccctgggctgtctggtgaaggattacttccctgagccagtgaccgtgtcctggaactctggggccctgaccagcggagtgcacacatttcccgccgtgctgcagagctccggactgtactccctgtctagcgtggtgaccgtgccttcctctagcctgggcacccagacatatatctgcaacgtgaatcacaagccttccaatacaaaggtcgacaagaaggtggagccaaagtcttgtgataagacccacacatgcccaccttgtccggcgccagaggccgccggaggaccaagcgtgttcctgtttccacccaagcccaaggacaccctgatgatctcccggaccccagaggtgacatgcgtggtggtgagcgtgtcccacgaggaccccgaggtgaagtttaactggtacgtggatggcgtggaggtgcacaatgccaagacaaagccccgggaggagcagtacaattctacctatagagtggtgagcgtgctgacagtgctgcaccaggattggctgaacggcaaggagtataagtgtaaggtgagcaataaggccctgccagcccccatcgagaagaccatctccaaggccaagggccagcctcgcgagccccaggtgtacgtgtatccccctagcagagacgagctgacaaagaaccaggtgtccctgacctgcctggtgaagggcttctatccctctgatatcgccgtggagtgggagagcaatggccagcctgagaacaattacaagaccacaccacccgtgctggacagcgatggctccttcgccctggtgagcaagctgacagtggacaagtccaggtggcagcagggcaacgtgttttcttgcagcgtgatgcacgaggccctgcacaatcactatacccagaagtccctgtctctgagcccaggaggaggaggaggcgatatcgtgatgacccagacaccaagctccgtgagcgccgccgtgggaggaaccgtgacaatcaagtgtcaggcctcccagaccatcggctctagcctggcctggtatcagcagaagcctggccagcctccaaagctgctgatctacagagcctccacactggcctctggcgtgtcctctcggttcagaggctccggctctggcaccgagtacaccctgacaatcagcgacctggagtgcgcagatgcagcaacatactattgtcagtggaccgactacggctatatctacatctgggcctttggcggaggaaccgaggtggtggtgaagggaggaggaggcagcggcggcggaggctccggcggcggcggctctcaggagcagctggtggagtctggaggaggactggtgcagcctgagggctccctgaccctgacatgcaccgcctctaagttcagctttagctccctgtactatatgtgctgggtgaggcaggccccaggcaagggactggagtggatcgcctgcgtgtatggcggctctagcggcaacacctactatgcctcctgggccaagggccgcttcacaatctctaaggcctcctctaccacagtgaccctgcagctgacaagcctgaccgccgccgatacagccacctacttctgtgcccggtttgacgtggatggctccggctttaatctgtggggaccaggcacactggtgaccgtgagctcc

SEQ ID NO: 182 - protein, 214 aa, Artificial Sequence
  Clone No. 14471
DIQMTQSTSSLSASVGDRVTISCSASQGISNYLNWYQQKPDGTVKLLIYYTSSLHSGVPSRFSGSGSGTDYSLTISNLEPEDIATYYCQQYSKFPWTFGGGTKLEIKRTVAAPSVFIFPPSDEQLKSGTASVVCLLNNFYPREAKVQWKVDNALQSGNSQESVTEQDSKDSTYSLSSTLTLSKADYEKHKVYACEVTHQGLSSPVTKSFNRGEC

SEQ ID NO: 183 - DNA, 642 bp, Artificial Sequence
  Clone No. 14471
gacatccagatgacccagtccacaagctccctgtccgcctctgtgggcgatagagtgacaatcagctgctccgcctctcagggcatctctaactacctgaattggtatcagcagaagcctgacggcaccgtgaagctgctgatctactatacatctagcctgcacagcggagtgccatccaggtttagcggctccggctctggcaccgactactctctgacaatcagcaacctggagcccgaggatatcgccacctactattgtcagcagtatagcaagttcccttggacctttggcggcggcacaaagctggagatcaagcgcacagtggcggcgcccagtgtcttcatttttccccctagcgacgaacagctgaagtctgggacagccagtgtggtctgtctgctgaacaacttctaccctagagaggctaaagtgcagtggaaggtcgataacgcactgcagtccggaaattctcaggagagtgtgactgaacaggactcaaaagatagcacctattccctgtcaagcacactgactctgagcaaggccgactacgagaagcataaagtgtatgcttgtgaagtcacccaccaggggctgagttcaccagtcacaaaatcattcaacagaggggagtgc

SEQ ID NO: 184 - protein, 450 aa, Artificial Sequence
  Clone No. 4553
EVQLVESGGGLVQPGGSLRLSCAASGFNIKDTYIHWVRQAPGKGLEWVARIYPTNGYTRYADSVKGRFTISADTSKNTAYLQMNSLRAEDTAVYYCSRWGGDGFYAMDYWGQGTLVTVSSASTKGPSVFPLAPSSKSTSGGTAALGCLVKDYFPEPVTVSWNSGALTSGVHTFPAVLQSSGLYSLSSVVTVPSSSLGTQTYICNVNHKPSNTKVDKKVEPKSCDKTHTCPPCPAPELLGGPSVFLFPPKPKDTLMISRTPEVTCVVVDVSHEDPEVKFNWYVDGVEVHNAKTKPREEQYNSTYRVVSVLTVLHQDWLNGKEYKCKVSNKALPAPIEKTISKAKGQPREPQVYVYPPSRDELTKNQVSLTCLVKGFYPSDIAVEWESNGQPENNYKTTPPVLDSDGSFALVSKLTVDKSRWQQGNVFSCSVMHEALHNHYTQKSLSLSPGK

SEQ ID NO: 185 - DNA, 1350 bp, Artificial Sequence
  Clone No. 4553
gaagtccagctggtcgaaagcggaggaggactggtgcagccaggagggtctctgcgactgagttgcgccgcttcaggcttcaacatcaaggacacctacattcactgggtgcgccaggctcctggaaaaggcctggagtgggtggcacgaatctatccaactaatggatacacccggtatgcagacagcgtgaagggccggttcaccattagcgcagatacatccaaaaacactgcctacctgcagatgaacagcctgcgagccgaagatactgctgtgtactattgcagtcggtggggaggcgacggcttctacgctatggattattgggggcagggaaccctggtcacagtgagctccgcatctacaaaggggcctagtgtgtttccactggccccctctagtaaatccacctctgggggaacagcagccctgggatgtctggtgaaggactatttcccagagcccgtcactgtgagttggaactcaggcgccctgacatccggggtccatacttttcctgctgtgctgcagtcaagcggcctgtactctctgtcctctgtggtcaccgtgccaagttcaagcctggggactcagacctatatctgcaacgtgaatcacaagccaagcaatacaaaagtcgacaagaaagtggaacccaagagctgtgataaaacacatacttgccccccttgtcctgcaccagagctgctgggaggaccatccgtgttcctgtttccacccaagcctaaagacaccctgatgatttccaggactccagaagtcacctgcgtggtcgtggacgtgtctcacgaggaccccgaagtcaagttcaactggtacgtggatggcgtcgaggtgcataatgccaagacaaaacccagggaggaacagtacaactcaacttatcgcgtcgtgagcgtcctgaccgtgctgcaccaggactggctgaacggcaaggagtataagtgcaaagtgagcaataaggctctgcccgcacctatcgagaaaaccattagcaaggccaaagggcagcctagagaaccacaggtctacgtgtatcctccaagcagggacgagctgaccaagaaccaggtctccctgacatgtctggtgaaagggttttaccccagtgatatcgctgtggagtgggaatcaaatggacagcctgaaaacaattataagaccacaccccctgtgctggacagcgatggcagcttcgctctggtctccaagctgactgtggataaatctcggtggcagcagggcaacgtctttagttgttcagtgatgcatgaggcactgcacaatcattacacccagaagagcctgtccctgtctcccggcaaa

SEQ ID NO: 186 - protein, 694 aa, Artificial Sequence
  Clone No. 10443
DIQMTQSPSSLSASVGDRVTITCRASQDVNTAVAWYQQKPGKAPKLLIYSASFLYSGVPSRFSGSRSGTDFTLTISSLQPEDFATYYCQQHYTTPPTFGQGTKVEIKGGSGGGSGGGSGGGSGGGSGEVQLVESGGGLVQPGGSLRLSCAASGFNIKDTYIHWVRQAPGKGLEWVARIYPTNGYTRYADSVKGRFTISADTSKNTAYLQMNSLRAEDTAVYYCSRWGGDGFYAMDYWGQGTLVTVSSGGEVQLVQSGAEVKKPGESLRISCKGSGYSFSTYWISWVRQMPGKGLEWMGKIYPGDSYTNYSPSFQGQVTISADKSISTAYLQWSSLKASDTAMYYCARGYGIFDYWGQGTLVTVSSASTKGPSVFPLAPSSKSTSGGTAALGCLVKDYFPEPVTVSWNSGALTSGVHTFPAVLQSSGLYSLSSVVTVPSSSLGTQTYICNVNHKPSNTKVDKKVEPKSCDKTHTCPPCPAPEAAGGPSVFLFPPKPKDTLMISRTPEVTCVVVSVSHEDPEVKFNWYVDGVEVHNAKTKPREEQYNSTYRVVSVLTVLHQDWLNGKEYKCKVSNKALPAPIEKTISKAKGQPREPQVYVLPPSRDELTKNQVSLLCLVKGFYPSDIAVEWESNGQPENNYLTWPPVLDSDGSFFLYSKLTVDKSRWQQGNVFSCSVMHEALHNHYTQKSLSLSPG

SEQ ID NO: 187 - DNA, 2082 bp, Artificial Sequence
  Clone No. 10443
gacatccagatgacacagtccccaagctccctgtccgcctctgtgggcgacagggtgaccatcacatgcagggccagccaggatgtgaacaccgccgtggcctggtaccagcagaagccaggcaaggcccccaagctgctgatctacagcgcctccttcctgtattctggcgtgccaagccggttttctggcagcagatccggcaccgacttcaccctgacaatctctagcctgcagcccgaggattttgccacatactattgccagcagcactacaccacaccccctaccttcggccagggcacaaaggtggagatcaagggcggctccggcggcggctctggaggaggcagcggaggaggctccggcggaggctctggcgaggtgcagctggtggagagcggaggaggcctggtgcagccaggaggcagcctgagactgtcctgtgccgcctctggctttaacatcaaggacacctacatccactgggtgcggcaggcccccggcaagggcctggagtgggtggccagaatctatcctaccaatggctacacacggtatgccgactccgtgaagggccggttcaccatcagcgccgatacctccaagaacacagcctacctgcagatgaacagcctgcgggccgaggatacagccgtgtactattgcagccgctggggaggcgacggcttctacgccatggattattggggccagggcaccctggtgacagtgtcctctggcggagaagtgcagctggtgcagtctggagccgaggtgaagaagcccggcgagtctctgaggatcagctgtaagggctccggctactcttttagcacctattggatctcctgggtgcgccagatgcctggcaagggcctggaatggatgggcaagatctaccctggcgactcctacacaaattattccccatctttccagggccaggtgaccatctctgccgataagagcatctccacagcctatctgcagtggagctccctgaaggccagcgacaccgccatgtactattgtgccagaggctacggcatcttcgactactggggacagggcaccctggtcacagtgtctagcgctagcactaaggggccttccgtgtttccactggctccctctagtaaatccacctctggaggcacagctgcactgggatgtctggtgaaggattacttccctgaaccagtcacagtgagttggaactcaggggctctgacaagtggagtccatacttttcccgcagtgctgcagtcaagcggactgtactccctgtcctctgtggtcaccgtgcctagttcaagcctgggcacccagacatatatctgcaacgtgaatcacaagccatcaaatacaaaagtcgacaagaaagtggagcccaagagctgtgataaaactcatacctgcccaccttgtccggcgccagaggcagcaggaggaccaagcgtgttcctgtttccacccaagcccaaagacaccctgatgattagccgaacccctgaagtcacatgcgtggtcgtgtccgtgtctcacgaggacccagaagtcaagttcaactggtacgtggatggcgtcgaggtgcataatgccaagacaaaaccccgggaggaacagtacaacagcacctatagagtcgtgtccgtcctgacagtgctgcaccaggattggctgaacggcaaggaatataagtgcaaagtgtccaataaggccctgcccgctcctatcgagaaaaccatttctaaggcaaaaggccagcctcgcgaaccacaggtctacgtgctgcctccatcccgggacgagctgacaaagaaccaggtctctctgctgtgcctggtgaaaggcttctatccatcagatattgctgtggagtgggaaagcaatgggcagcccgagaacaattacctgacttggccccctgtgctggactctgatgggagtttctttctgtattctaagctgaccgtggataaaagtaggtggcagcagggaaatgtctttagttgttcagtgatgcatgaagccctgcataaccactacacccagaaaagcctgtccctgtcccccgga

SEQ ID NO: 188 - protein, 696 aa, Artificial Sequence
  Clone No. 10445
EVQLVQSGAEVKKPGESLRISCKGSGYSFSTYWISWVRQMPGKGLEWMGKIYPGDSYTNYSPSFQGQVTISADKSISTAYLQWSSLKASDTAMYYCARGYGIFDYWGQGTLVTVSSASTKGPSVFPLAPSSKSTSGGTAALGCLVKDYFPEPVTVSWNSGALTSGVHTFPAVLQSSGLYSLSSVVTVPSSSLGTQTYICNVNHKPSNTKVDKKVEPKSCDKTHTCPPCPAPEAAGGPSVFLFPPKPKDTLMISRTPEVTCVVVSVSHEDPEVKFNWYVDGVEVHNAKTKPREEQYNSTYRVVSVLTVLHQDWLNGKEYKCKVSNKALPAPIEKTISKAKGQPREPQVYVLPPSRDELTKNQVSLLCLVKGFYPSDIAVEWESNGQPENNYLTWPPVLDSDGSFFLYSKLTVDKSRWQQGNVFSCSVMHEALHNHYTQKSLSLSPGGGGGDIQMTQSPSSLSASVGDRVTITCRASQDVNTAVAWYQQKPGKAPKLLIYSASFLYSGVPSRFSGSRSGTDFTLTISSLQPEDFATYYCQQHYTTPPTFGQGTKVEIKGGSGGGSGGGSGGGSGGGSGEVQLVESGGGLVQPGGSLRLSCAASGFNIKDTYIHWVRQAPGKGLEWVARIYPTNGYTRYADSVKGRFTISADTSKNTAYLQMNSLRAEDTAVYYCSRWGGDGFYAMDYWGQGTLVTVSS

SEQ ID NO: 189 - DNA, 2088 bp, Artificial Sequence
  Clone No. 10445
gaggtgcagctggtgcagtccggagcagaggtgaagaagcctggcgagagcctgaggatctcctgcaagggctctggctactccttttctacctattggatcagctgggtgcgccagatgccaggcaagggcctggagtggatgggcaagatctaccctggcgactcctacacaaactatagcccatccttccagggccaggtgaccatctctgccgataagtctatcagcacagcctatctgcagtggagctccctgaaggcctccgacaccgccatgtactattgcgccagaggctacggcatctttgattattggggccagggcaccctggtgacagtgtctagcgctagcacaaagggcccttccgtgttccctctggccccatcctctaagtccacctctggaggaacagccgccctgggctgtctggtgaaggactactttcctgagccagtgaccgtgtcttggaacagcggggccctgaccagcggagtgcacacattccccgccgtgctgcagagctccggcctgtactccctgtctagcgtggtgaccgtgccttcctctagcctgggcacccagacatatatctgcaacgtgaatcacaagccatccaatacaaaggtcgacaagaaggtggagcccaagtcttgtgataagacccacacatgcccaccttgtccggcgccagaggccgccggaggaccaagcgtgttcctgtttccacccaagcctaaggacaccctgatgatctccaggacccctgaggtgacatgcgtggtggtgagcgtgtcccacgaggacccagaggtgaagtttaactggtacgtggatggcgtggaggtgcacaatgccaagaccaagcccagggaggagcagtacaactctacctatcgcgtggtgagcgtgctgacagtgctgcaccaggattggctgaacggcaaggagtataagtgcaaggtgtctaataaggccctgccagcccccatcgagaagaccatcagcaaggccaagggccagcctcgcgaacctcaggtgtacgtgctgcctccatctagagacgagctgacaaagaaccaggtgagcctgctgtgcctggtgaagggcttttatcccagcgatatcgccgtggagtgggagtccaatggccagcctgagaacaattacctgacctggccccctgtgctggactccgatggctctttctttctgtattccaagctgacagtggacaagtctcgctggcagcagggcaacgtgttctcttgcagcgtgatgcacgaggccctgcacaatcactacacccagaagtccctgagcttaagcccaggaggaggaggaggcgatatccagatgacacagagcccatcctctctgtccgcctctgtgggcgacagggtgaccatcacatgtcgcgcctcccaggatgtgaataccgccgtggcctggtatcagcagaagccaggcaaggcccccaagctgctgatctacagcgcctccttcctgtatagcggcgtgccatcccggttttctggcagcagatccggcaccgacttcaccctgacaatcagctccctgcagcccgaggattttgccacatactattgccagcagcactacaccacaccacccaccttcggccagggcacaaaggtggagatcaagggaggctctggaggaggcagcggaggaggctccggaggaggctctggcggcggcagcggcgaggtgcagctggtggagagcggcggcggcctggtgcagcccggcggctccctgcggctgtcttgtgccgccagcggcttcaacatcaaggacacctacatccactgggtgcggcaggcacctggcaagggcctggaatgggtggccagaatctatccaaccaatggctacacacggtatgccgacagcgtgaagggccggttcaccatctccgccgatacctctaagaacacagcctacctgcagatgaatagcctgagggccgaggatacagccgtgtactattgctccagatggggaggcgacggcttctacgccatggactactggggacagggcaccctggtcacagtgtctagc

SEQ ID NO: 190 - protein, 446 aa, Artificial Sequence
  Clone No. 21112
EVQLVESGGGLIQPGGSLRLSCAASGFSLTTYAISWVRQAPGKGLEWVSIIWPGGGTNYADSVKGRFTISRDNSKNTLYLQMNSLRAEDTAVYYCARGAGTWYFDVWGQGTLVTVSSASTKGPSVFPLAPSSKSTSGGTAALGCLVKDYFPEPVTVSWNSGALTSGVHTFPAVLQSSGLYSLSSVVTVPSSSLGTQTYICNVNHKPSNTKVDKKVEPKSCDKTHTCPPCPAPEAAGGPSVFLFPPKPKDTLMISRTPEVTCVVVSVSHEDPEVKFNWYVDGVEVHNAKTKPREEQYNSTYRVVSVLTVLHQDWLNGKEYKCKVSNKALPAPIEKTISKAKGQPREPQVYTLPPSRDELTKNQVSLTCLVKGFYPSDIAVEWESNGQPENNYKTTPPVLDSDGSFFLYSKLTVDKSRWQQGNVFSCSVMHEALHNHYTQKSLSLSPG

SEQ ID NO: 191 - DNA, 1338 bp, Artificial Sequence
  Clone No. 21112
gaggtgcagctggtggagtccggaggaggactgatccagccaggaggctccctgcggctgtcttgcgccgcctctggctttagcctgaccacatacgccatctcttgggtgagacaggcccccggcaagggactggagtgggtgtctatcatctggcctggcggcggcacaaactacgccgacagcgtgaagggccggttcaccatcagcagagataactccaagaatacactgtatctgcagatgaatagcctgagggccgaggacaccgccgtgtactattgtgcccggggggcagggacatggtattttgacgtgtggggccagggcaccctggtgacagtgagctccgctagcacaaagggcccctccgtgtttcctctggccccatcctctaagtccacctctggaggaacagccgccctgggctgtctggtgaaggattacttccctgagccagtgaccgtgtcctggaactctggggccctgaccagcggagtgcacacatttcccgccgtgctgcagagctccggactgtactccctgtctagcgtggtgaccgtgccttcctctagcctgggcacccagacatatatctgcaacgtgaatcacaagccttccaatacaaaggtcgacaagaaggtggagccaaagtcttgtgataagacccacacatgcccaccttgtccggcgccagaggccgccggaggaccaagcgtgttcctgtttccacccaagcccaaggacaccctgatgatctcccggaccccagaggtgacatgcgtggtggtgagcgtgtcccacgaggaccccgaggtgaagtttaactggtacgtggatggcgtggaggtgcacaatgccaagacaaagccccgggaggagcagtacaattctacctatagagtggtgagcgtgctgacagtgctgcaccaggattggctgaacggcaaggagtataagtgtaaggtgagcaataaggccctgccagcccccatcgagaagaccatctccaaggccaagggccagcctcgcgaaccacaggtgtacactctgcctccatctcgggacgagctgactaagaaccaggtcagtctgacctgtctggtgaaaggattctatcccagcgatatcgctgtggagtgggaatccaatggccagcctgagaacaattacaagaccacaccccctgtgctggactctgatggcagtttctttctgtatagtaagctgaccgtcgataaatcacgatggcagcaggggaacgtgttcagctgttcagtgatgcacgaagccctgcacaaccattacacccagaagagcctgagcctgtctcccggc

SEQ ID NO: 192 - protein, 446 aa, Artificial Sequence
  Clone No. 21113
EVQLVESGGGLIQPGGSLRLSCAVSGFSLTTYAISWVRQAPGKGLEWLGIIWPGGGTNYADSVKGRFTISRDNSKNTLYLQMNSLRAEDTAVYYCARGAGTWYFDVWGQGTLVTVSSASTKGPSVFPLAPSSKSTSGGTAALGCLVKDYFPEPVTVSWNSGALTSGVHTFPAVLQSSGLYSLSSVVTVPSSSLGTQTYICNVNHKPSNTKVDKKVEPKSCDKTHTCPPCPAPEAAGGPSVFLFPPKPKDTLMISRTPEVTCVVVSVSHEDPEVKFNWYVDGVEVHNAKTKPREEQYNSTYRVVSVLTVLHQDWLNGKEYKCKVSNKALPAPIEKTISKAKGQPREPQVYTLPPSRDELTKNQVSLTCLVKGFYPSDIAVEWESNGQPENNYKTTPPVLDSDGSFFLYSKLTVDKSRWQQGNVFSCSVMHEALHNHYTQKSLSLSPG

SEQ ID NO: 193 - DNA, 1338 bp, Artificial Sequence
  Clone No. 21113
gaggtgcagctggtggagtccggaggaggactgatccagccaggaggctccctgcggctgtcttgcgccgtgtctggctttagcctgaccacatacgccatctcttgggtgagacaggcccccggcaagggactggagtggctgggaatcatctggcctggaggaggcacaaactacgccgactctgtgaagggccggttcaccatcagcagagataactccaagaatacactgtatctgcagatgaatagcctgagggccgaggacaccgccgtgtactattgtgcccggggggcagggacatggtattttgacgtgtggggccagggcaccctggtgacagtgagctccgctagcacaaagggcccctccgtgtttcctctggccccatcctctaagtccacctctggaggaacagccgccctgggctgtctggtgaaggattacttccctgagccagtgaccgtgtcctggaactctggggccctgaccagcggagtgcacacatttcccgccgtgctgcagagctccggactgtactccctgtctagcgtggtgaccgtgccttcctctagcctgggcacccagacatatatctgcaacgtgaatcacaagccttccaatacaaaggtcgacaagaaggtggagccaaagtcttgtgataagacccacacatgcccaccttgtccggcgccagaggccgccggaggaccaagcgtgttcctgtttccacccaagcccaaggacaccctgatgatctcccggaccccagaggtgacatgcgtggtggtgagcgtgtcccacgaggaccccgaggtgaagtttaactggtacgtggatggcgtggaggtgcacaatgccaagacaaagccccgggaggagcagtacaattctacctatagagtggtgagcgtgctgacagtgctgcaccaggattggctgaacggcaaggagtataagtgtaaggtgagcaataaggccctgccagcccccatcgagaagaccatctccaaggccaagggccagcctcgcgaaccacaggtgtacactctgcctccatctcgggacgagctgactaagaaccaggtcagtctgacctgtctggtgaaaggattctatcccagcgatatcgctgtggagtgggaatccaatggccagcctgagaacaattacaagaccacaccccctgtgctggactctgatggcagtttctttctgtatagtaagctgaccgtcgataaatcacgatggcagcaggggaacgtgttcagctgttcagtgatgcacgaagccctgcacaaccattacacccagaagagcctgagcctgtctcccggc

SEQ ID NO: 194 - protein, 446 aa, Artificial Sequence
  Clone No. 21114
EVQLVESGGGLIQPGGSLRLSCAVSGFSLTTYAISWVRQAPGKGLEWLGIIWPGGGTNYADSVKGRFTISKDNSKNTLYLQMNSLRAEDTAVYYCARGAGTWYFDVWGQGTLVTVSSASTKGPSVFPLAPSSKSTSGGTAALGCLVKDYFPEPVTVSWNSGALTSGVHTFPAVLQSSGLYSLSSVVTVPSSSLGTQTYICNVNHKPSNTKVDKKVEPKSCDKTHTCPPCPAPEAAGGPSVFLFPPKPKDTLMISRTPEVTCVVVSVSHEDPEVKFNWYVDGVEVHNAKTKPREEQYNSTYRVVSVLTVLHQDWLNGKEYKCKVSNKALPAPIEKTISKAKGQPREPQVYTLPPSRDELTKNQVSLTCLVKGFYPSDIAVEWESNGQPENNYKTTPPVLDSDGSFFLYSKLTVDKSRWQQGNVFSCSVMHEALHNHYTQKSLSLSPG

SEQ ID NO: 195 - DNA, 1338 bp, Artificial Sequence
  Clone No. 21114
gaggtgcagctggtggagtccggcggcggcctgatccagccaggaggctccctgaggctgtcttgcgccgtgtctggctttagcctgaccacatacgcaatctcttgggtgcgccaggcccccggcaagggactggagtggctgggaatcatctggcctggaggaggcacaaactacgccgactctgtgaagggccggttcaccatcagcaaggataactccaagaatacactgtatctgcagatgaatagcctgcgggcagaggacaccgccgtgtactattgtgcccggggggcagggacatggtattttgacgtgtggggccagggcaccctggtgacagtgagctccgctagcacaaagggcccctccgtgtttcctctggccccatcctctaagtccacctctggaggaacagccgccctgggctgtctggtgaaggattacttccctgagccagtgaccgtgtcctggaactctggggccctgaccagcggagtgcacacatttcccgccgtgctgcagagctccggactgtactccctgtctagcgtggtgaccgtgccttcctctagcctgggcacccagacatatatctgcaacgtgaatcacaagccttccaatacaaaggtcgacaagaaggtggagccaaagtcttgtgataagacccacacatgcccaccttgtccggcgccagaggccgccggaggaccaagcgtgttcctgtttccacccaagcccaaggacaccctgatgatctcccggaccccagaggtgacatgcgtggtggtgagcgtgtcccacgaggaccccgaggtgaagtttaactggtacgtggatggcgtggaggtgcacaatgccaagacaaagccccgggaggagcagtacaattctacctatagagtggtgagcgtgctgacagtgctgcaccaggattggctgaacggcaaggagtataagtgtaaggtgagcaataaggccctgccagcccccatcgagaagaccatctccaaggccaagggccagcctcgcgaaccacaggtgtacactctgcctccatctcgggacgagctgactaagaaccaggtcagtctgacctgtctggtgaaaggattctatcccagcgatatcgctgtggagtgggaatccaatggccagcctgagaacaattacaagaccacaccccctgtgctggactctgatggcagtttctttctgtatagtaagctgaccgtcgataaatcacgatggcagcaggggaacgtgttcagctgttcagtgatgcacgaagccctgcacaaccattacacccagaagagcctgagcctgtctcccggc

SEQ ID NO: 196 - protein, 232 aa, Artificial Sequence
  Clone No. 4560
EPKSSDKTHTCPPCPAPELLGGPSVFLFPPKPKDTLMISRTPEVTCVVVDVSHEDPEVKFNWYVDGVEVHNAKTKPREEQYNSTYRVVSVLTVLHQDWLNGKEYKCKVSNKALPAPIEKTISKAKGQPREPQVYVLPPSRDELTKNQVSLLCLVKGFYPSDIAVEWESNGQPENNYLTWPPVLDSDGSFFLYSKLTVDKSRWQQGNVFSCSVMHEALHNHYTQKSLSLSPGK

SEQ ID NO: 197 - DNA, 696 bp, Artificial Sequence
  Clone No. 4560
gaacctaaaagcagcgacaagacccacacatgccccccttgtccagctccagaactgctgggaggaccaagcgtgttcctgtttccacccaagcccaaagatacactgatgatcagccgaactcccgaggtcacctgcgtggtcgtggacgtgtcccacgaggaccccgaagtcaagttcaactggtacgtggacggcgtcgaagtgcataatgcaaagactaaaccacgggaggaacagtacaactctacatatagagtcgtgagtgtcctgactgtgctgcatcaggattggctgaacggcaaagagtataagtgcaaagtgtctaataaggccctgcctgctccaatcgagaaaactattagtaaggcaaaagggcagcccagggaacctcaggtctacgtgctgcctccaagtcgcgacgagctgaccaagaaccaggtctcactgctgtgtctggtgaaaggattctatccttccgatattgccgtggagtgggaatctaatggccagccagagaacaattacctgacctggccccctgtgctggacagcgatgggtccttctttctgtattcaaagctgacagtggacaaaagcagatggcagcagggaaacgtctttagctgttccgtgatgcacgaagccctgcacaatcattacacccagaagtctctgagtctgtcacctggcaaa

SEQ ID NO: 198 - protein, 446 aa, Artificial Sequence
  Clone No. 21115
EVQLVESGGGLIQPGGSLRISCAVSGFSLTTYAISWVRQAPGKGLEWLGIIWPGGGTNYADSLKGRLTISKDNSKNTVYLQMNSLRTEDTAVYYCARGAGTWYFDVWGQGTLVTVSSASTKGPSVFPLAPSSKSTSGGTAALGCLVKDYFPEPVTVSWNSGALTSGVHTFPAVLQSSGLYSLSSVVTVPSSSLGTQTYICNVNHKPSNTKVDKKVEPKSCDKTHTCPPCPAPEAAGGPSVFLFPPKPKDTLMISRTPEVTCVVVSVSHEDPEVKFNWYVDGVEVHNAKTKPREEQYNSTYRVVSVLTVLHQDWLNGKEYKCKVSNKALPAPIEKTISKAKGQPREPQVYTLPPSRDELTKNQVSLTCLVKGFYPSDIAVEWESNGQPENNYKTTPPVLDSDGSFFLYSKLTVDKSRWQQGNVFSCSVMHEALHNHYTQKSLSLSPG

SEQ ID NO: 199 - DNA, 1338 bp, Artificial Sequence
  Clone No. 21115
gaggtgcagctggtggagtccggcggcggcctgatccagccaggaggctccctgaggatctcttgcgccgtgtctggctttagcctgaccacatacgcaatctcttgggtgcgccaggcccccggcaagggactggagtggctgggaatcatctggcctggaggaggaaccaactacgcagactctctgaagggcagactgaccatcagcaaggataactccaagaatacagtgtatctgcagatgaatagcctgcggaccgaggacacagccgtgtactattgtgcccggggggcagggacatggtatttcgacgtgtggggacagggcaccctggtgacagtgagctccgctagcacaaagggcccctccgtgtttcctctggccccatcctctaagtccacctctggaggaacagccgccctgggctgtctggtgaaggattacttccctgagccagtgaccgtgtcctggaactctggggccctgaccagcggagtgcacacatttcccgccgtgctgcagagctccggactgtactccctgtctagcgtggtgaccgtgccttcctctagcctgggcacccagacatatatctgcaacgtgaatcacaagccttccaatacaaaggtcgacaagaaggtggagccaaagtcttgtgataagacccacacatgcccaccttgtccggcgccagaggccgccggaggaccaagcgtgttcctgtttccacccaagcccaaggacaccctgatgatctcccggaccccagaggtgacatgcgtggtggtgagcgtgtcccacgaggaccccgaggtgaagtttaactggtacgtggatggcgtggaggtgcacaatgccaagacaaagccccgggaggagcagtacaattctacctatagagtggtgagcgtgctgacagtgctgcaccaggattggctgaacggcaaggagtataagtgtaaggtgagcaataaggccctgccagcccccatcgagaagaccatctccaaggccaagggccagcctcgcgaaccacaggtgtacactctgcctccatctcgggacgagctgactaagaaccaggtcagtctgacctgtctggtgaaaggattctatcccagcgatatcgctgtggagtgggaatccaatggccagcctgagaacaattacaagaccacaccccctgtgctggactctgatggcagtttctttctgtatagtaagctgaccgtcgataaatcacgatggcagcaggggaacgtgttcagctgttcagtgatgcacgaagccctgcacaaccattacacccagaagagcctgagcctgtctcccggc

SEQ ID NO: 200 - protein, 696 aa, Artificial Sequence
  Clone No. 18556
QVQLKESGPGLVAPSQSLSITCTVSGFSLTSYAISWVRQPPGKGLEWLGVIWPGGGTNYNSALKSRLSISKDNSKSQVFLKMNSLQTDDTARYYCARGTGTWYFDVWGAGTTVTVSSASTKGPSVFPLAPSSKSTSGGTAALGCLVKDYFPEPVTVSWNSGALTSGVHTFPAVLQSSGLYSLSSVVTVPSSSLGTQTYICNVNHKPSNTKVDKKVEPKSCDKTHTCPPCPAPEAAGGPSVFLFPPKPKDTLMISRTPEVTCVVVSVSHEDPEVKFNWYVDGVEVHNAKTKPREEQYNSTYRVVSVLTVLHQDWLNGKEYKCKVSNKALPAPIEKTISKAKGQPREPQVYVYPPSRDELTKNQVSLTCLVKGFYPSDIAVEWESNGQPENNYKTTPPVLDSDGSFALVSKLTVDKSRWQQGNVFSCSVMHEALHNHYTQKSLSLSPGGGGGDIVMTQTPASVEAAVGGTVTIKCQASQSIYSSLAWYQQKPGQSPKLLIYDASHLASGVPSRFSGSRYGTEFTLTISGVQCDDAATYYCQGGWYSSAATYVPNTFGGGTEVVVKGGGGSGGGGSGGGGSQEQLVESGGGLVQPEGSLTLTCKASGFTISNNYYMCWVRQAPGKGLEWIACIYGGISGRTYYASWAKGRFTISKTSSTTVTLQMTSLTAADTATYFCVRGYVGTSNLWGPGTLVTVSS

SEQ ID NO: 201 - DNA, 2088 bp, Artificial Sequence
  Clone No. 18556
caggtgcagctgaaggagtctggaccaggactggtggccccctctcagagcctgtccatcacctgcacagtgagcggcttttccctgacctcttacgcaatctcctgggtgcggcagccacctggcaagggactggagtggctgggcgtgatctggccaggaggaggcacaaactataatagcgccctgaagtccaggctgtctatcagcaaggacaactccaagtctcaggtgttcctgaagatgaatagcctgcagaccgacgatacagcccggtactattgtgccagaggcaccggcacatggtactttgacgtgtggggggcagggaccacagtgacagtgagctccgctagcacaaagggcccctccgtgtttcctctggccccatcctctaagtccacctctggaggaacagccgccctgggctgtctggtgaaggattacttccctgagccagtgaccgtgtcctggaactctggggccctgaccagcggagtgcacacatttcccgccgtgctgcagagctccggactgtactccctgtctagcgtggtgaccgtgccttcctctagcctgggcacccagacatatatctgcaacgtgaatcacaagccttccaatacaaaggtcgacaagaaggtggagccaaagtcttgtgataagacccacacatgcccaccttgtccggcgccagaggccgccggaggaccaagcgtgttcctgtttccacccaagcccaaggacaccctgatgatctcccggaccccagaggtgacatgcgtggtggtgagcgtgtcccacgaggaccccgaggtgaagtttaactggtacgtggatggcgtggaggtgcacaatgccaagacaaagccccgggaggagcagtacaattctacctatagagtggtgagcgtgctgacagtgctgcaccaggattggctgaacggcaaggagtataagtgtaaggtgagcaataaggccctgccagcccccatcgagaagaccatctccaaggccaagggccagcctcgcgagccacaggtgtacgtgtatccccctagcagggacgagctgacaaagaaccaggtgtccctgacctgcctggtgaagggcttctacccctccgatatcgccgtggagtgggagtctaatggccagcctgagaacaattataagaccacaccacccgtgctggactctgatggcagcttcgccctggtgagcaagctgacagtggacaagtccagatggcagcagggcaacgtgttttcttgcagcgtgatgcacgaggccctgcacaatcactacacccagaagtccctgtctctgagcccaggaggaggaggaggcgatatcgtgatgacccagacacccgcctccgtggaggccgccgtgggaggaaccgtgacaatcaagtgtcaggcctcccagtctatctacagctccctggcctggtatcagcagaagcctggccagagcccaaagctgctgatctacgacgcctcccacctggcctctggagtgccaagccggttcagcggctccagatatggcacagagtttaccctgacaatctccggagtgcagtgcgacgatgcagcaacctactattgtcagggaggatggtactctagcgccgccacctatgtgcctaacacattcggcggcggcaccgaggtggtggtgaagggaggaggaggctccggcggaggaggctctggcggcggcggcagccaggagcagctggtggagtctggaggaggactggtgcagcctgagggcagcctgaccctgacatgcaaggcctccggctttaccatctctaacaattactatatgtgctgggtgcggcaggccccaggcaagggactggagtggatcgcctgcatctacggcggcatctctggcaggacatactatgccagctgggccaagggccgcttcaccatctccaagacatcctctaccacagtgaccctgcagatgacctctctgacagccgccgataccgccacatacttttgcgtgcggggctatgtgggcaccagcaatctgtggggccctggcaccctggtgacagtgagctcc

SEQ ID NO: 202 - protein, 449 aa, Artificial Sequence
  Clone No. 11011
QVTLRESGPALVKPTQTLTLTCTFSGFSLSTSGMSVGWIRQPPGKALEWLADIWWDDKKDYNPSLKSRLTISKDTSKNQVVLKVTNMDPADTATYYCARSMITNWYFDVWGAGTTVTVSSASTKGPSVFPLAPSSKSTSGGTAALGCLVKDYFPEPVTVSWNSGALTSGVHTFPAVLQSSGLYSLSSVVTVPSSSLGTQTYICNVNHKPSNTKVDKKVEPKSCDKTHTCPPCPAPEAAGGPSVFLFPPKPKDTLMISRTPEVTCVVVSVSHEDPEVKFNWYVDGVEVHNAKTKPREEQYNSTYRVVSVLTVLHQDWLNGKEYKCKVSNKALPAPIEKTISKAKGQPREPQVYVYPPSRDELTKNQVSLTCLVKGFYPSDIAVEWESNGQPENNYKTTPPVLDSDGSFALVSKLTVDKSRWQQGNVFSCSVMHEALHNHYTQKSLSLSPG

SEQ ID NO: 203 - DNA, 1347 bp, Artificial Sequence
  Clone No. 11011
caggtgacactgagggagagcggaccagccctggtgaagccaacccagacactgaccctgacatgcaccttctccggctttagcctgtccacatctggcatgtctgtgggctggatcagacagccacctggcaaggccctggagtggctggccgacatctggtgggacgataagaaggattacaaccctagcctgaagtccagactgacaatctctaaggacaccagcaagaaccaggtggtgctgaaggtgaccaatatggaccccgccgatacagccacctactattgtgcccggtccatgattactaactggtattttgatgtctggggggcaggaacaaccgtgaccgtctcttctgctagcactaaggggccttccgtgtttccactggctccctctagtaaatccacctctggaggcacagctgcactgggatgtctggtgaaggattacttccctgaaccagtcacagtgagttggaactcaggggctctgacaagtggagtccatacttttcccgcagtgctgcagtcaagcggactgtactccctgtcctctgtggtcaccgtgcctagttcaagcctgggcacccagacatatatctgcaacgtgaatcacaagccatcaaatacaaaagtcgacaagaaagtggagcccaagagctgtgataaaactcatacctgcccaccttgtccggcgccagaggctgcaggaggaccaagcgtgttcctgtttccacccaagcctaaagacacactgatgatttcccgaacccccgaagtcacatgcgtggtcgtgtctgtgagtcacgaggaccctgaagtcaagttcaactggtacgtggatggcgtcgaggtgcataatgccaagactaaacctagggaggaacagtacaactcaacctatcgcgtcgtgagcgtcctgacagtgctgcaccaggattggctgaacggcaaagaatataagtgcaaagtgagcaataaggccctgcccgctcctatcgagaaaaccatttccaaggctaaagggcagcctcgcgaaccacaggtctacgtgtatcctccaagccgggacgagctgacaaagaaccaggtctccctgacttgtctggtgaaagggttttaccctagtgatatcgctgtggagtgggaatcaaatggacagccagagaacaattataagactaccccccctgtgctggacagtgatgggtcattcgcactggtctccaagctgacagtggacaaatctcggtggcagcagggaaatgtcttttcatgtagcgtgatgcatgaagcactgcacaaccattacacccagaagtcactgtcactgtcaccagga

SEQ ID NO: 204 - protein, 446 aa, Artificial Sequence
  Clone No. 2871
EVQLVQSGAEVKKPGESLRISCKGSGYSFSTYWISWVRQMPGKGLEWMGKIYPGDSYTNYSPSFQGQVTISADKSISTAYLQWSSLKASDTAMYYCARGYGIFDYWGQGTLVTVSSASTKGPSVFPLAPCSRSTSESTAALGCLVKDYFPEPVTVSWNSGALTSGVHTFPAVLQSSGLYSLSSVVTVPSSNFGTQTYTCNVDHKPSNTKVDKTVEPKSCDKTHTCPPCPAPELLGGPSVFLFPPKPKDTLMISRTPEVTCVVVDVSHEDPEVKFNWYVDGVEVHNAKTKPREEQYNSTYRVVSVLTVLHQDWLNGKEYKCKVSNKALPAPIEKTISKAKGQPREPQVYVYPPSRDELTKNQVSLTCLVKGFYPSDIAVEWESNGQPENNYKTTPPVLDSDGSFALVSKLTVDKSRWQQGNVFSCSVMHEALHNHYTQKSLSLSPGK

SEQ ID NO: 205 - DNA, 1338 bp, Artificial Sequence
  Clone No. 2871
gaagtgcagctggtccagtccggagccgaggtgaagaaacccggcgaatcactgcgaatcagctgcaagggcagcggctacagcttctccacatattggattagctgggtgcggcagatgcctgggaagggactggagtggatggggaaaatctaccccggagatagctacactaactattctcctagttttcagggccaggtgaccatctccgccgacaagtcaattagcacagcttatctgcagtggagctccctgaaagctagcgataccgcaatgtactattgtgccagaggctacgggattttcgactattggggacagggcacactggtcactgtgtctagtgcttctacaaaggggcccagtgtgtttccactggcaccctgctccaggtctaccagtgaatcaacagccgctctgggatgtctggtgaaagattacttcccagagcccgtcactgtgagctggaactccggcgcactgacatctggggtccacacttttcctgccgtgctgcagtcaagcggcctgtacagcctgtcctctgtggtcaccgtgccaagttcaaatttcgggactcagacctatacatgcaacgtggaccacaagccttctaataccaaggtcgataaaacagtggaaccaaagagttgtgacaaaactcatacctgccccccttgtcctgctccagagctgctgggaggaccatccgtgttcctgtttccacccaagcccaaagatacactgatgatcagccgcactccagaagtgacctgcgtggtcgtggacgtgtcccacgaggaccccgaagtcaagtttaactggtacgtggacggcgtcgaggtgcataatgccaagaccaaaccacgggaggaacagtacaattcaacatatagagtcgtgagcgtcctgactgtgctgcaccaggattggctgaacggcaaggagtataagtgcaaagtgtctaataaggcactgcccgcccctatcgagaaaaccattagcaaggcaaaagggcagcctagggaaccacaggtctacgtgtatcctccaagccgcgatgagctgactaagaaccaggtctccctgacctgtctggtgaaagggttctaccccagtgacattgccgtggagtgggaatcaaatggacagcctgaaaacaattataagaccacaccccctgtgctggactctgatggaagtttcgccctggtctccaagctgactgtggacaaatctcgatggcagcagggcaacgtctttagctgttccgtgatgcatgaggctctgcacaatcattacacccagaagtctctgagtctgtcacctggcaaa

SEQ ID NO: 206 - protein, 214 aa, Artificial Sequence
  Clone No. 2872
SYELTQPPSVSVSPGQTASITCSGDNIGDQYAHWYQQKPGQSPVLVIYQDKNRPSGIPERFSGSNSGNTATLTISGTQAMDEADYYCATYTGFGSLAVFGGGTKLTVLGQPKAAPSVTLFPPSSEELQANKATLYCLISDFYPGAVTVAWKADSSPVKAGVETTTPSKQSNNKYAASSYLSITPEQWKSHRSYSCQVTHEGSTVEKTVAPTECS

SEQ ID NO: 207 - DNA, 642 bp, Artificial Sequence
  Clone No. 2872
tcctatgaactgacccagcccccttccgtgtctgtcagtccagggcagacagcctccatcacttgctctggagacaacattggcgatcagtacgctcactggtatcagcagaagcctggccagtctccagtgctggtcatctaccaggacaaaaatcggcccagtgggattcctgagagattctcagggagcaactccggaaataccgccacactgactatcagcgggacacaggcaatggacgaagccgattactattgcgctacctatacaggcttcgggtccctggcagtgtttggcgggggaactaagctgaccgtgctgggacagccaaaagccgctccctctgtgaccctgttcccacccagctccgaggaactgcaggctaacaaggcaaccctgtactgtctgatcagcgacttttatcctggagcagtgacagtcgcctggaaggctgattctagtcctgtgaaagctggcgtcgagaccacaactccatcaaagcagagcaacaacaagtacgcagcctcaagctatctgagtattactcccgaacagtggaagtcacacaggtcttacagttgccaggtgacccatgagggcagcaccgtggaaaaaacagtcgcccctactgagtgttcc

SEQ ID NO: 208 - protein, 213 aa, Artificial Sequence
  Clone No. 11074
DIQMTQSPSTLSASVGDRVTITCKCQLSVGYMHWYQQKPGKAPKLLIYDTSKLASGVPSRFSGSGSGTEFTLTISSLQPDDFATYYCFQGSGYPFTFGGGTKLEIKRTVAAPSVFIFPPSDEQLKSGTASVVCLLNNFYPREAKVQWKVDNALQSGNSQESVTEQDSKDSTYSLSSTLTLSKADYEKHKVYACEVTHQGLSSPVTKSFNRGEC

SEQ ID NO: 209 - DNA, 639 bp, Artificial Sequence
  Clone No. 11074
gatattcagatgacccagtctcccagcacactgtccgcctctgtgggcgaccgggtgaccatcacatgcaagtgtcagctgagcgtgggctacatgcactggtatcagcagaagcccggcaaggcccctaagctgctgatctacgataccagcaagctggcctccggcgtgccatctagattcagcggctccggctctggcaccgagtttaccctgacaatcagctccctgcagcccgacgatttcgccacatactattgctttcaggggagcggctacccattcacattcggagggggaactaaactggaaatcaagaggaccgtcgcggcgcccagtgtcttcatttttccccctagcgacgaacagctgaagtctgggacagccagtgtggtctgtctgctgaacaacttctaccctagagaggctaaagtgcagtggaaggtcgataacgcactgcagtccggaaattctcaggagagtgtgactgaacaggactcaaaagatagcacctattccctgtcaagcacactgactctgagcaaggccgactacgagaagcataaagtgtatgcttgtgaagtcacccaccaggggctgagttcaccagtcacaaaatcattcaacagaggggagtgc

SEQ ID NO: 210 - protein, 477 aa, Artificial Sequence
  Clone No. 11082
QVTLRESGPALVKPTQTLTLTCTFSGFSLSTSGMSVGWIRQPPGKALEWLADIWWDDKKDYNPSLKSRLTISKDTSKNQVVLKVTNMDPADTATYYCARSMITNWYFDVWGAGTTVTVSSVEGGSGGSGGSGGSGGVDDIQMTQSPSTLSASVGDRVTITCKCQLSVGYMHWYQQKPGKAPKLLIYDTSKLASGVPSRFSGSGSGTEFTLTISSLQPDDFATYYCFQGSGYPFTFGGGTKLEIKAAEPKSSDKTHTCPPCPAPEAAGGPSVFLFPPKPKDTLMISRTPEVTCVVVSVSHEDPEVKFNWYVDGVEVHNAKTKPREEQYNSTYRVVSVLTVLHQDWLNGKEYKCKVSNKALPAPIEKTISKAKGQPREPQVYVLPPSRDELTKNQVSLLCLVKGFYPSDIAVEWESNGQPENNYLTWPPVLDSDGSFFLYSKLTVDKSRWQQGNVFSCSVMHEALHNHYTQKSLSLSPG

SEQ ID NO: 211 - DNA, 1431 bp, Artificial Sequence
  Clone No. 11082
caggtgaccctgagagagagcggacccgccctggtgaagcctacccagacactgaccctgacatgcaccttcagcggctttagcctgtccacctctggcatgtccgtgggatggatcaggcagccacctggcaaggccctggagtggctggccgacatctggtgggacgataagaaggattacaacccttccctgaagtctcgcctgacaatctccaaggacacctctaagaaccaggtggtgctgaaggtgaccaatatggacccagccgatacagccacctactattgtgcccggtccatgatcacaaattggtatttcgacgtgtggggagccggaaccacagtgaccgtgagctccgtggagggaggcagcggaggctccggaggctctggaggcagcggaggagtggacgatatccagatgacacagagcccctccaccctgtctgccagcgtgggcgaccgggtgacaatcacctgcaagtgtcagctgtccgtgggctacatgcactggtatcagcagaagcctggcaaggccccaaagctgctgatctacgataccagcaagctggcctccggcgtgccttctaggttctccggctctggcagcggcacagagtttacactgaccatctctagcctgcagccagacgatttcgccacctactattgctttcagggcagcggctatcccttcacatttggcggcggcaccaagctggagatcaaggccgccgagcctaagtcctctgacaagacacacacctgcccaccctgtccggcgccagaggcagcaggaggaccaagcgtgttcctgtttccacccaagcccaaagacaccctgatgattagccgaacccctgaagtcacatgcgtggtcgtgtccgtgtctcacgaggacccagaagtcaagttcaactggtacgtggatggcgtcgaggtgcataatgccaagacaaaaccccgggaggaacagtacaacagcacctatagagtcgtgtccgtcctgacagtgctgcaccaggattggctgaacggcaaggaatataagtgcaaagtgtccaataaggccctgcccgctcctatcgagaaaaccatttctaaggcaaaaggccagcctcgcgaaccacaggtctacgtgctgcctccatcccgggacgagctgacaaagaaccaggtctctctgctgtgcctggtgaaaggcttctatccatcagatattgctgtggagtgggaaagcaatgggcagcccgagaacaattacctgacttggccccctgtgctggactctgatgggagtttctttctgtattctaagctgaccgtggataaaagtaggtggcagcagggaaatgtctttagttgttcagtgatgcatgaagccctgcataaccactacacccagaaaagcctgtccctgtcccccgga

SEQ ID NO: 212 - protein, 445 aa, Artificial Sequence
  Clone No. 8021
EVQLVQSGAEVKKPGESLRISCKGSGYSFSTYWISWVRQMPGKGLEWMGKIYPGDSYTNYSPSFQGQVTISADKSISTAYLQWSSLKASDTAMYYCARGYGIFDYWGQGTLVTVSSASTKGPSVFPLAPSSKSTSGGTAALGCLVKDYFPEPVTVSWNSGALTSGVHTFPAVLQSSGLYSLSSVVTVPSSSLGTQTYICNVNHKPSNTKVDKKVEPKSCDKTHTCPPCPAPELLGGPSVFLFPPKPKDTLMISRTPEVTCVVVDVSHEDPEVKFNWYVDGVEVHNAKTKPREEQYNSTYRVVSVLTVLHQDWLNGKEYKCKVSNKALPAPIEKTISKAKGQPREPQVYVYPPSRDELTKNQVSLTCLVKGFYPSDIAVEWESNGQPENNYKTTPPVLDSDGSFALVSKLTVDKSRWQQGNVFSCSVMHEALHNHYTQKSLSLSPG

SEQ ID NO: 213 - DNA, 1335 bp, Artificial Sequence
  Clone No. 8021
gaggtccagctggtgcagagtggcgctgaggtcaagaaaccaggggaaagtctgcggatctcatgcaagggcagcgggtactctttcagtacttattggatttcttgggtgagacagatgcccggaaagggcctggagtggatggggaaaatctaccccggagactcctacaccaactattcacctagctttcagggccaggtcaccatctctgcagacaagtccatttctacagcctatctgcagtggagctccctgaaagccagcgatacagctatgtactattgtgcaagaggatacggcattttcgattattggggccagggcaccctggtcaccgtctcatctgctagcactaaggggccttccgtgtttccactggctccctctagtaaatccacctctggaggcacagctgcactgggatgtctggtgaaggattacttccctgaaccagtcacagtgagttggaactcaggggctctgacaagtggagtccatacttttcccgcagtgctgcagtcaagcggactgtactccctgtcctctgtggtcaccgtgcctagttcaagcctgggcacccagacatatatctgcaacgtgaatcacaagccatcaaatacaaaagtcgacaagaaagtggagcccaagagctgtgataaaactcatacctgcccaccttgtccggcgccagaactgctgggaggaccaagcgtgttcctgtttccacccaagcctaaagacaccctgatgatttcccggactcctgaggtcacctgcgtggtcgtggacgtgtctcacgaggaccccgaagtcaagttcaactggtacgtggatggcgtcgaagtgcataatgccaagaccaaaccccgggaggaacagtacaactctacctatagagtcgtgagtgtcctgacagtgctgcaccaggactggctgaatgggaaggagtataagtgtaaagtgagcaacaaagccctgcccgccccaatcgaaaaaacaatctctaaagcaaaaggacagcctcgcgaaccacaggtctacgtctaccccccatcaagagatgaactgacaaaaaatcaggtctctctgacatgcctggtcaaaggattctacccttccgacatcgccgtggagtgggaaagtaacggccagcccgagaacaattacaagaccacaccccctgtcctggactctgatgggagtttcgctctggtgtcaaagctgaccgtcgataaaagccggtggcagcagggcaatgtgtttagctgctccgtcatgcacgaagccctgcacaatcactacacacagaagtccctgagcctgagccctggc

SEQ ID NO: 214 - protein, 214 aa, Artificial Sequence
  Clone No. 8022
SYELTQPPSVSVSPGQTASITCSGDNIGDQYAHWYQQKPGQSPVLVIYQDKNRPSGIPERFSGSNSGNTATLTISGTQAMDEADYYCATYTGFGSLAVFGGGTKLTVLGQPKAAPSVTLFPPSSEELQANKATLVCLISDFYPGAVTVAWKADSSPVKAGVETTTPSKQSNNKYAASSYLSLTPEQWKSHRSYSCQVTHEGSTVEKTVAPTECS

SEQ ID NO: 215 - DNA, 642 bp, Artificial Sequence
  Clone No. 8022
agctatgaactgacacagccacctagcgtgtccgtctctccaggacagactgcatccatcacctgctctggcgacaacattggggatcagtacgcccactggtatcagcagaagccagggcagagtcccgtgctggtcatctaccaggacaaaaatcggccttccggcatccccgagagattcagtggatcaaacagcggcaataccgctacactgactatcagcggcacccaggccatggacgaagctgattactattgtgccacctatacagggtttggaagtctggccgtcttcggcggcggcaccaaactgaccgtcctggggcagccaaaagcggcgcccagtgtcacactgtttccccctagctccgaggaactgcaggctaacaaagcaacactggtgtgtctgatcagcgacttctaccctggagctgtgactgtcgcctggaaggctgattctagtccagtgaaagcaggcgtcgagaccacaactccctctaagcagagtaacaacaagtacgcagcctcaagctatctgtcactgaccccagaacagtggaagagccaccggagctattcctgccaggtcactcacgaaggctccactgtcgagaaaaccgtcgctcccaccgaatgttca

SEQ ID NO: 216 - protein, 444 aa, Artificial Sequence
  Clone No. 14395
QVQLQQSGPELVKPGASVKISCKASGYVFSSYWMNWVKQRPGKGLEWIGRIYPGNGDTNYNGKFKDKATLTADKFSSTAYMQLSNLTSEDSAVYFCASYYELDYWGQGTSVTVSSASTKGPSVFPLAPSSKSTSGGTAALGCLVKDYFPEPVTVSWNSGALTSGVHTFPAVLQSSGLYSLSSVVTVPSSSLGTQTYICNVNHKPSNTKVDKKVEPKSCDKTHTCPPCPAPEAAGGPSVFLFPPKPKDTLMISRTPEVTCVVVSVSHEDPEVKFNWYVDGVEVHNAKTKPREEQYNSTYRVVSVLTVLHQDWLNGKEYKCKVSNKALPAPIEKTISKAKGQPREPQVYTLPPSRDELTKNQVSLTCLVKGFYPSDIAVEWESNGQPENNYKTTPPVLDSDGSFFLYSKLTVDKSRWQQGNVFSCSVMHEALHNHYTQKSLSLSPG

SEQ ID NO: 217 - DNA, 1332 bp, Artificial Sequence
  Clone No. 14395
caggtgcagctgcagcagtccggaccagagctggtgaagcctggggccagcgtgaagatcagctgcaaggcctccggctacgtgtttagctcctattggatgaactgggtgaagcagcggccaggcaagggactggagtggatcggcagaatctaccccggcaatggcgacacaaactataatggcaagttcaaggacaaggccaccctgacagccgataagttttctagcaccgcctacatgcagctgtctaacctgacaagcgaggactccgccgtgtacttctgtgcctcttactatgagctggattattggggccagggcaccagcgtgacagtgtcctctgctagcacaaagggcccctccgtgtttcctctggccccatcctctaagtccacctctggaggaacagccgccctgggctgtctggtgaaggattacttccctgagccagtgaccgtgtcctggaactctggggccctgaccagcggagtgcacacatttcccgccgtgctgcagagctccggactgtactccctgtctagcgtggtgaccgtgccttcctctagcctgggcacccagacatatatctgcaacgtgaatcacaagccttccaatacaaaggtcgacaagaaggtggagccaaagtcttgtgataagacccacacatgcccaccttgtccggcgccagaggccgccggaggaccaagcgtgttcctgtttccacccaagcccaaggacaccctgatgatctcccggaccccagaggtgacatgcgtggtggtgagcgtgtcccacgaggaccccgaggtgaagtttaactggtacgtggatggcgtggaggtgcacaatgccaagacaaagccccgggaggagcagtacaattctacctatagagtggtgagcgtgctgacagtgctgcaccaggattggctgaacggcaaggagtataagtgtaaggtgagcaataaggccctgccagcccccatcgagaagaccatctccaaggccaagggccagcctcgcgaaccacaggtgtacactctgcctccatctcgggacgagctgactaagaaccaggtcagtctgacctgtctggtgaaaggattctatcccagcgatatcgctgtggagtgggaatccaatggccagcctgagaacaattacaagaccacaccccctgtgctggactctgatggcagtttctttctgtatagtaagctgaccgtcgataaatcacgatggcagcaggggaacgtgttcagctgttcagtgatgcacgaagccctgcacaaccattacacccagaagagcctgagcctgtctcccggc

SEQ ID NO: 218 - protein, 232 aa, Artificial Sequence
  Clone No. 1380
EPKSSDKTHTCPPCPAPEAAGGPSVFLFPPKPKDTLMISRTPEVTCVVVSVSHEDPEVKFNWYVDGVEVHNAKTKPREEQYNSTYRVVSVLTVLHQDWLNGKEYKCKVSNKALPAPIEKTISKAKGQPREPQVYVYPPSRDELTKNQVSLTCLVKGFYPSDIAVEWESNGQPENNYKTTPPVLDSDGSFALVSKLTVDKSRWQQGNVFSCSVMHEALHNHYTQKSLSLSPGK

SEQ ID NO: 219 - DNA, 696 bp, Artificial Sequence
  Clone No. 1380
gaacctaagagcagcgacaagactcacacctgcccaccttgtccagcaccagaagccgccggaggaccaagcgtgttcctgtttccacccaagcccaaagataccctgatgatcagccgaacacccgaagtgacttgcgtggtcgtgagcgtgtcccacgaggaccccgaagtcaagttcaactggtacgtggacggcgtcgaagtgcataatgctaagacaaaaccacgggaggaacagtacaactctacttatagagtcgtgagtgtcctgaccgtgctgcatcaggattggctgaacggcaaagagtataagtgcaaagtgtctaataaggccctgcctgctccaatcgagaaaaccattagtaaggctaaagggcagcccagggaacctcaggtctacgtgtatcctccaagtcgcgacgagctgaccaagaaccaggtctcactgacatgtctggtgaaaggattttacccttccgatattgcagtggagtgggaatctaatggccagccagagaacaattataagaccacaccccctgtgctggacagcgatgggtccttcgcactggtctcaaagctgacagtggacaaaagcagatggcagcagggaaacgtctttagctgttccgtgatgcacgaagccctgcacaatcattacactcagaagtctctgagtctgtcacctggcaaa

SEQ ID NO: 220 - protein, 231 aa, Artificial Sequence
  Clone No. 8056
EPKSSDKTHTCPPCPAPELLGGPSVFLFPPKPKDTLMISRTPEVTCVVVDVSHEDPEVKFNWYVDGVEVHNAKTKPREEQYNSTYRVVSVLTVLHQDWLNGKEYKCKVSNKALPAPIEKTISKAKGQPREPQVYVYPPSRDELTKNQVSLTCLVKGFYPSDIAVEWESNGQPENNYKTTPPVLDSDGSFALVSKLTVDKSRWQQGNVFSCSVMHEALHNHYTQKSLSLSPG

SEQ ID NO: 221 - DNA, 693 bp, Artificial Sequence
  Clone No. 8056
gaacctaaatcatccgataaaactcacacctgtccaccctgtccggcgccagaactgctgggggggccctccgtcttcctgtttccccctaagccaaaagacaccctgatgatctctaggactcccgaagtcacctgcgtggtcgtggacgtgagtcacgaggaccccgaagtcaagttcaactggtacgtggatggcgtcgaggtgcataatgccaagaccaaaccccgggaggaacagtacaacagcacctatagagtcgtgtccgtcctgacagtgctgcaccaggactggctgaacggaaaggagtataagtgcaaagtgtcaaataaggccctgcccgctcctatcgagaaaaccattagcaaggctaaaggccagcctcgcgaaccccaggtctacgtgtatccccctagccgcgacgagctgacaaagaaccaggtctccctgacttgtctggtgaaagggttttaccctagtgatatcgcagtggagtgggaatcaaatggacagccagaaaacaattataagaccacaccacccgtgctggacagcgatggctccttcgcactggtctccaagctgactgtggataaatctcgatggcagcaggggaacgtctttagctgctccgtgatgcacgaggccctgcacaatcattacacacagaagtctctgagcttaagccctgga

SEQ ID NO: 222 - protein, 454 aa, Artificial Sequence
  Clone No. 10619
QVQLVQSGAEVKKPGASVRVSCRASGYIFTESGITWVRQAPGQGLEWMGWISGYSGDTKYAQKLQGRVTMTKDTSTTTAYMELRSLRYDDTAVYYCARDVQYSGSYLGAYYFDYWSPGTLVTVSSASTKGPSVFPLAPSSKSTSGGTAALGCLVKDYFPEPVTVSWNSGALTSGVHTFPAVLQSSGLYSLSSVVTVPSSSLGTQTYICNVNHKPSNTKVDKKVEPKSCDKTHTCPPCPAPEAAGGPSVFLFPPKPKDTLMISRTPEVTCVVVSVSHEDPEVKFNWYVDGVEVHNAKTKPREEQYNSTYRVVSVLTVLHQDWLNGKEYKCKVSNKALPAPIEKTISKAKGQPREPQVYVYPPSRDELTKNQVSLTCLVKGFYPSDIAVEWESNGQPENNYKTTPPVLDSDGSFALVSKLTVDKSRWQQGNVFSCSVMHEALHNHYTQKSLSLSPG

SEQ ID NO: 223 - DNA, 1362 bp, Artificial Sequence
  Clone No. 10619
caggtgcagctggtccagtccggggctgaagtgaaaaaacctggggcatccgtgcgggtgtcatgtcgggcaagcgggtatatctttactgagtctggaatcacctgggtgaggcaggctcccggacagggactggaatggatgggatggatttctggatacagtggcgacacaaagtatgcacagaaactgcagggccgcgtcaccatgacaaaggatacttcaaccacaactgcctacatggagctgcggagcctgagatatgacgatacagccgtgtactattgcgcccgggacgtgcagtacagcgggtcctacctgggggcatactacttcgattactggtcacctggaactctggtcaccgtctcttcagctagcactaaggggccttccgtgtttccactggctccctctagtaaatccacctctggaggcacagctgcactgggatgtctggtgaaggattacttccctgaaccagtcacagtgagttggaactcaggggctctgacaagtggagtccatacttttcccgcagtgctgcagtcaagcggactgtactccctgtcctctgtggtcaccgtgcctagttcaagcctgggcacccagacatatatctgcaacgtgaatcacaagccatcaaatacaaaagtcgacaagaaagtggagcccaagagctgtgataaaactcatacctgcccaccttgtccggcgccagaggctgcaggaggaccaagcgtgttcctgtttccacccaagcctaaagacacactgatgatttcccgaacccccgaagtcacatgcgtggtcgtgtctgtgagtcacgaggaccctgaagtcaagttcaactggtacgtggatggcgtcgaggtgcataatgccaagactaaacctagggaggaacagtacaactcaacctatcgcgtcgtgagcgtcctgacagtgctgcaccaggattggctgaacggcaaagaatataagtgcaaagtgagcaataaggccctgcccgctcctatcgagaaaaccatttccaaggctaaagggcagcctcgcgaaccacaggtctacgtgtatcctccaagccgggacgagctgacaaagaaccaggtctccctgacttgtctggtgaaagggttttaccctagtgatatcgctgtggagtgggaatcaaatggacagccagagaacaattataagactaccccccctgtgctggacagtgatgggtcattcgcactggtctccaagctgacagtggacaaatctcggtggcagcagggaaatgtcttttcatgtagcgtgatgcatgaagcactgcacaaccattacacccagaagtcactgtcactgtcaccagga

SEQ ID NO: 224 - protein, 454 aa, Artificial Sequence
  Clone No. 10620
QVQLVQSGAEVKKPGASVRVSCRASGYIFTESGITWVRQAPGQGLEWMGWISGYSGDTKYAQKLQGRVTMTKDTSTTTAYMELRSLRYDDTAVYYCARDVQYSGSYLGAYYFDYWSPGTLVTVSSASTKGPSVFPLAPSSKSTSGGTAALGCLVKDYFPEPVTVSWNSGALTSGVHTFPAVLQSSGLYSLSSVVTVPSSSLGTQTYICNVNHKPSNTKVDKKVEPKSCDKTHTCPPCPAPEAAGGPSVFLFPPKPKDTLMISRTPEVTCVVVSVSHEDPEVKFNWYVDGVEVHNAKTKPREEQYNSTYRVVSVLTVLHQDWLNGKEYKCKVSNKALPAPIEKTISKAKGQPREPQVYVLPPSRDELTKNQVSLLCLVKGFYPSDIAVEWESNGQPENNYLTWPPVLDSDGSFFLYSKLTVDKSRWQQGNVFSCSVMHEALHNHYTQKSLSLSPG

SEQ ID NO: 225 - DNA, 1362 bp, Artificial Sequence
  Clone No. 10620
caggtgcagctggtccagtccggggctgaagtgaaaaaacctggggcatccgtgcgggtgtcatgtcgggcaagcgggtatatctttactgagtctggaatcacctgggtgaggcaggctcccggacagggactggaatggatgggatggatttctggatacagtggcgacacaaagtatgcacagaaactgcagggccgcgtcaccatgacaaaggatacttcaaccacaactgcctacatggagctgcggagcctgagatatgacgatacagccgtgtactattgcgcccgggacgtgcagtacagcgggtcctacctgggggcatactacttcgattactggtcacctggaactctggtcaccgtctcttcagctagcactaaggggccttccgtgtttccactggctccctctagtaaatccacctctggaggcacagctgcactgggatgtctggtgaaggattacttccctgaaccagtcacagtgagttggaactcaggggctctgacaagtggagtccatacttttcccgcagtgctgcagtcaagcggactgtactccctgtcctctgtggtcaccgtgcctagttcaagcctgggcacccagacatatatctgcaacgtgaatcacaagccatcaaatacaaaagtcgacaagaaagtggagcccaagagctgtgataaaactcatacctgcccaccttgtccggcgccagaggcagcaggaggaccaagcgtgttcctgtttccacccaagcccaaagacaccctgatgattagccgaacccctgaagtcacatgcgtggtcgtgtccgtgtctcacgaggacccagaagtcaagttcaactggtacgtggatggcgtcgaggtgcataatgccaagacaaaaccccgggaggaacagtacaacagcacctatagagtcgtgtccgtcctgacagtgctgcaccaggattggctgaacggcaaggaatataagtgcaaagtgtccaataaggccctgcccgctcctatcgagaaaaccatttctaaggcaaaaggccagcctcgcgaaccacaggtctacgtgctgcctccatcccgggacgagctgacaaagaaccaggtctctctgctgtgcctggtgaaaggcttctatccatcagatattgctgtggagtgggaaagcaatgggcagcccgagaacaattacctgacttggccccctgtgctggactctgatgggagtttctttctgtattctaagctgaccgtggataaaagtaggtggcagcagggaaatgtctttagttgttcagtgatgcatgaagccctgcataaccactacacccagaaaagcctgtccctgtcccccgga

SEQ ID NO: 226 - protein, 214 aa, Artificial Sequence
  Clone No. 11150
DIQMTQSPSSLSASVGDRVTITCRASQDVNTAVAWYQQKPGKAPKLLIYSASFLYSGVPSRFSGSRSGTDFTLTISSLQPEDFATYYCQQHYTTPPTFGQGTKVEIKRTVAAPSVFIFPPSDEQLKSGTASVVCLLNNFYPREAKVQWKVDNALQSGNSQESVTEQDSKDSTYSLSSTLTLSKADYEKHKVYACEVTHQGLSSPVTKSFNRGEC

SEQ ID NO: 227 - DNA, 642 bp, Artificial Sequence
  Clone No. 11150
gacatccagatgacacagtccccaagctccctgtccgcctctgtgggcgacagggtgaccatcacatgccgcgcctctcaggatgtgaacaccgccgtggcctggtaccagcagaagccaggcaaggcccccaagctgctgatctacagcgcctccttcctgtattctggcgtgcccagccggttttctggcagcagatccggcaccgacttcaccctgacaatctctagcctgcagcctgaggattttgccacatactattgtcagcagcactataccacaccccctaccttcggccagggcacaaaggtggagatcaagcggacagtggcggcgcccagtgtcttcatttttccccctagcgacgaacagctgaagtctgggacagccagtgtggtctgtctgctgaacaacttctaccctagagaggctaaagtgcagtggaaggtcgataacgcactgcagtccggaaattctcaggagagtgtgactgaacaggactcaaaagatagcacctattccctgtcaagcacactgactctgagcaaggccgactacgagaagcataaagtgtatgcttgtgaagtcacccaccaggggctgagttcaccagtcacaaaatcattcaacagaggggagtgc

SEQ ID NO: 228 - protein, 214 aa, Artificial Sequence
  Clone No. 20891
DIQMTQSPSSLSASVGDRVTITCSASQGISNYLNWYQQKPGKAPKLLIYYTSSLHSGVPSRFSGSGSGTDFTFTISSLQPEDIATYYCQQYSKFPWTFGQGTKVEIKRTVAAPSVFIFPPSDEQLKSGTASVVCLLNNFYPREAKVQWKVDNALQSGNSQESVTEQDSKDSTYSLSSTLTLSKADYEKHKVYACEVTHQGLSSPVTKSFNRGEC

SEQ ID NO: 229 - DNA, 642 bp, Artificial Sequence
  Clone No. 20891
gacatccagatgacacagagcccaagctccctgagcgcctccgtgggcgatagagtgaccatcacatgctctgccagccagggcatctccaactacctgaattggtatcagcagaagcccggcaaggcccctaagctgctgatctactatacctctagcctgcactccggcgtgccttctaggttttccggctctggcagcggcaccgacttcacctttacaatctcctctctgcagcctgaggatatcgccacatactattgtcagcagtactctaagttcccatggacctttggccagggcacaaaggtggagatcaagcgcacagtggcggcgcccagtgtcttcatttttccccctagcgacgaacagctgaagtctgggacagccagtgtggtctgtctgctgaacaacttctaccctagagaggctaaagtgcagtggaaggtcgataacgcactgcagtccggaaattctcaggagagtgtgactgaacaggactcaaaagatagcacctattccctgtcaagcacactgactctgagcaaggccgactacgagaagcataaagtgtatgcttgtgaagtcacccaccaggggctgagttcaccagtcacaaaatcattcaacagaggggagtgc

SEQ ID NO: 230 - protein, 214 aa, Artificial Sequence
  Clone No. 20892
DIQMTQSPSSLSASVGDRVTITCSASQGISNYLNWYQQKPGKAPKLLIYYTSSLHSGVPSRFSGSGSGTDYTLTISSLQPEDIATYYCQQYSKFPWTFGQGTKLEIKRTVAAPSVFIFPPSDEQLKSGTASVVCLLNNFYPREAKVQWKVDNALQSGNSQESVTEQDSKDSTYSLSSTLTLSKADYEKHKVYACEVTHQGLSSPVTKSFNRGEC

SEQ ID NO: 231 - DNA, 642 bp, Artificial Sequence
  Clone No. 20892
gacatccagatgacacagagcccaagctccctgagcgcctccgtgggcgatagagtgaccatcacatgctctgccagccagggcatctccaactacctgaattggtatcagcagaagcccggcaaggcccctaagctgctgatctactatacctctagcctgcactccggcgtgccttctaggttttccggctctggcagcggaaccgactacaccctgacaatctcctctctgcagcctgaggatatcgccacatactattgtcagcagtattctaagttcccatggacctttggccagggcacaaagctggagatcaagcgcacagtggcggcgcccagtgtcttcatttttccccctagcgacgaacagctgaagtctgggacagccagtgtggtctgtctgctgaacaacttctaccctagagaggctaaagtgcagtggaaggtcgataacgcactgcagtccggaaattctcaggagagtgtgactgaacaggactcaaaagatagcacctattccctgtcaagcacactgactctgagcaaggccgactacgagaagcataaagtgtatgcttgtgaagtcacccaccaggggctgagttcaccagtcacaaaatcattcaacagaggggagtgc

SEQ ID NO: 232 - protein, 214 aa, Artificial Sequence
  Clone No. 20893
DIQMTQSPSSLSASVGDRVTITCSASQGISNYLNWYQQKPGKTVKLLIYYTSSLHSGVPSRFSGSGSGTDYTLTISSLQPEDIATYYCQQYSKFPWTFGQGTKLEIKRTVAAPSVFIFPPSDEQLKSGTASVVCLLNNFYPREAKVQWKVDNALQSGNSQESVTEQDSKDSTYSLSSTLTLSKADYEKHKVYACEVTHQGLSSPVTKSFNRGEC

SEQ ID NO: 233 - DNA, 642 bp, Artificial Sequence
  Clone No. 20893
gacatccagatgacacagagccctagctccctgagcgcctccgtgggcgatagagtgaccatcacatgctctgccagccagggcatctccaactacctgaattggtatcagcagaagcctggcaagaccgtgaagctgctgatctactatacatctagcctgcactccggcgtgccatctaggttttccggctctggcagcggaaccgactacaccctgacaatctcctctctgcagccagaggatatcgccacatactattgtcagcagtattctaagttcccctggacctttggccagggcacaaagctggagatcaagcgcaccgtggcggcgcccagtgtcttcatttttccccctagcgacgaacagctgaagtctgggacagccagtgtggtctgtctgctgaacaacttctaccctagagaggctaaagtgcagtggaaggtcgataacgcactgcagtccggaaattctcaggagagtgtgactgaacaggactcaaaagatagcacctattccctgtcaagcacactgactctgagcaaggccgactacgagaagcataaagtgtatgcttgtgaagtcacccaccaggggctgagttcaccagtcacaaaatcattcaacagaggggagtgc

SEQ ID NO: 234 - protein, 443 aa, Artificial Sequence
  Clone No. 20894
EVQLVESGGGLVQPGGSLRLSCAASGFTFSEFGMHWVRQAPGKGLEWVSYISSGGSTIYYADSVKGRFTISRDNAKNSLYLQMNSLRAEDTAVYYCARDWVDYWGQGTLVTVSSASTKGPSVFPLAPSSKSTSGGTAALGCLVKDYFPEPVTVSWNSGALTSGVHTFPAVLQSSGLYSLSSVVTVPSSSLGTQTYICNVNHKPSNTKVDKKVEPKSCDKTHTCPPCPAPEAAGGPSVFLFPPKPKDTLMISRTPEVTCVVVSVSHEDPEVKFNWYVDGVEVHNAKTKPREEQYNSTYRVVSVLTVLHQDWLNGKEYKCKVSNKALPAPIEKTISKAKGQPREPQVYTLPPSRDELTKNQVSLTCLVKGFYPSDIAVEWESNGQPENNYKTTPPVLDSDGSFFLYSKLTVDKSRWQQGNVFSCSVMHEALHNHYTQKSLSLSPG

SEQ ID NO: 235 - DNA, 1329 bp, Artificial Sequence
  Clone No. 20894
gaggtgcagctggtggagtccggaggaggactggtgcagccaggaggctccctgcggctgtcttgcgcagccagcggcttcacattttctgagttcggcatgcactgggtgagacaggcccccggcaagggactggagtgggtgtcctacatcagctccggcggctctaccatctactatgccgacagcgtgaagggccggtttacaatctccagagataacgccaagaacagcctgtacctgcagatgaacagcctgagggccgaggacaccgccgtgtactattgtgcccgcgactgggtggattattggggccagggcaccctggtgacagtgtctagcgctagcacaaagggcccctccgtgtttcctctggccccatcctctaagtccacctctggaggaacagccgccctgggctgtctggtgaaggattacttccctgagccagtgaccgtgtcctggaactctggggccctgaccagcggagtgcacacatttcccgccgtgctgcagagctccggactgtactccctgtctagcgtggtgaccgtgccttcctctagcctgggcacccagacatatatctgcaacgtgaatcacaagccttccaatacaaaggtcgacaagaaggtggagccaaagtcttgtgataagacccacacatgcccaccttgtccggcgccagaggccgccggaggaccaagcgtgttcctgtttccacccaagcccaaggacaccctgatgatctcccggaccccagaggtgacatgcgtggtggtgagcgtgtcccacgaggaccccgaggtgaagtttaactggtacgtggatggcgtggaggtgcacaatgccaagacaaagccccgggaggagcagtacaattctacctatagagtggtgagcgtgctgacagtgctgcaccaggattggctgaacggcaaggagtataagtgtaaggtgagcaataaggccctgccagcccccatcgagaagaccatctccaaggccaagggccagcctcgcgaaccacaggtgtacactctgcctccatctcgggacgagctgactaagaaccaggtcagtctgacctgtctggtgaaaggattctatcccagcgatatcgctgtggagtgggaatccaatggccagcctgagaacaattacaagaccacaccccctgtgctggactctgatggcagtttctttctgtatagtaagctgaccgtcgataaatcacgatggcagcaggggaacgtgttcagctgttcagtgatgcacgaagccctgcacaaccattacacccagaagagcctgagcctgtctcccggc

SEQ ID NO: 236 - protein, 443 aa, Artificial Sequence
  Clone No. 20895
EVQLVESGGGLVQPGGSLRLSCAASGFTFSEFGMHWVRQAPGKGLEWVAYISSGGSTIYYADSVKGRFTISRDNAKNSLYLQMNSLRAEDTAVYYCARDWVDYWGQGTLLTVSSASTKGPSVFPLAPSSKSTSGGTAALGCLVKDYFPEPVTVSWNSGALTSGVHTFPAVLQSSGLYSLSSVVTVPSSSLGTQTYICNVNHKPSNTKVDKKVEPKSCDKTHTCPPCPAPEAAGGPSVFLFPPKPKDTLMISRTPEVTCVVVSVSHEDPEVKFNWYVDGVEVHNAKTKPREEQYNSTYRVVSVLTVLHQDWLNGKEYKCKVSNKALPAPIEKTISKAKGQPREPQVYTLPPSRDELTKNQVSLTCLVKGFYPSDIAVEWESNGQPENNYKTTPPVLDSDGSFFLYSKLTVDKSRWQQGNVFSCSVMHEALHNHYTQKSLSLSPG

SEQ ID NO: 237 - DNA, 1329 bp, Artificial Sequence
  Clone No. 20895
gaggtgcagctggtggagagcggaggaggactggtgcagccaggaggctccctgcggctgtcttgcgcagccagcggcttcacattttccgagttcggcatgcactgggtgagacaggcccccggcaagggactggagtgggtggcctacatcagctccggcggctccaccatctactatgccgactctgtgaagggccggtttacaatcagcagagataacgccaagaacagcctgtacctgcagatgaactctctgagggccgaggacaccgccgtgtactattgtgcccgcgactgggtggattattggggccagggcaccctgctgacagtgtctagcgctagcacaaagggcccctccgtgtttcctctggccccatcctctaagtccacctctggaggaacagccgccctgggctgtctggtgaaggattacttccctgagccagtgaccgtgtcctggaactctggggccctgaccagcggagtgcacacatttcccgccgtgctgcagagctccggactgtactccctgtctagcgtggtgaccgtgccttcctctagcctgggcacccagacatatatctgcaacgtgaatcacaagccttccaatacaaaggtcgacaagaaggtggagccaaagtcttgtgataagacccacacatgcccaccttgtccggcgccagaggccgccggaggaccaagcgtgttcctgtttccacccaagcccaaggacaccctgatgatctcccggaccccagaggtgacatgcgtggtggtgagcgtgtcccacgaggaccccgaggtgaagtttaactggtacgtggatggcgtggaggtgcacaatgccaagacaaagccccgggaggagcagtacaattctacctatagagtggtgagcgtgctgacagtgctgcaccaggattggctgaacggcaaggagtataagtgtaaggtgagcaataaggccctgccagcccccatcgagaagaccatctccaaggccaagggccagcctcgcgaaccacaggtgtacactctgcctccatctcgggacgagctgactaagaaccaggtcagtctgacctgtctggtgaaaggattctatcccagcgatatcgctgtggagtgggaatccaatggccagcctgagaacaattacaagaccacaccccctgtgctggactctgatggcagtttctttctgtatagtaagctgaccgtcgataaatcacgatggcagcaggggaacgtgttcagctgttcagtgatgcacgaagccctgcacaaccattacacccagaagagcctgagcctgtctcccggc

SEQ ID NO: 238 - protein, 443 aa, Artificial Sequence
  Clone No. 20896
EVQLVESGGGLVQPGGSLRLSCAASGFTFSEFGMHWVRQAPGKGLEWVAYISSGGSTIYYADSVKGRFTISRDNAKNSLYLQMNSLRAEDTAMYYCARDWVDYWGQGTLLTVSSASTKGPSVFPLAPSSKSTSGGTAALGCLVKDYFPEPVTVSWNSGALTSGVHTFPAVLQSSGLYSLSSVVTVPSSSLGTQTYICNVNHKPSNTKVDKKVEPKSCDKTHTCPPCPAPEAAGGPSVFLFPPKPKDTLMISRTPEVTCVVVSVSHEDPEVKFNWYVDGVEVHNAKTKPREEQYNSTYRVVSVLTVLHQDWLNGKEYKCKVSNKALPAPIEKTISKAKGQPREPQVYTLPPSRDELTKNQVSLTCLVKGFYPSDIAVEWESNGQPENNYKTTPPVLDSDGSFFLYSKLTVDKSRWQQGNVFSCSVMHEALHNHYTQKSLSLSPG

SEQ ID NO: 239 - DNA, 1329 bp, Artificial Sequence
  Clone No. 20896
gaggtgcagctggtggagagcggaggaggactggtgcagccaggaggctccctgcggctgtcttgcgcagccagcggcttcacattttccgagttcggcatgcactgggtgagacaggcccccggcaagggactggagtgggtggcctacatcagctccggcggctccaccatctactatgccgactctgtgaagggccggtttacaatcagcagagataacgccaagaacagcctgtacctgcagatgaactctctgagggccgaggacaccgccatgtactattgtgcccgcgactgggtggattattggggccagggcaccctgctgacagtgtctagcgctagcacaaagggcccctccgtgtttcctctggccccatcctctaagtccacctctggaggaacagccgccctgggctgtctggtgaaggattacttccctgagccagtgaccgtgtcctggaactctggggccctgaccagcggagtgcacacatttcccgccgtgctgcagagctccggactgtactccctgtctagcgtggtgaccgtgccttcctctagcctgggcacccagacatatatctgcaacgtgaatcacaagccttccaatacaaaggtcgacaagaaggtggagccaaagtcttgtgataagacccacacatgcccaccttgtccggcgccagaggccgccggaggaccaagcgtgttcctgtttccacccaagcccaaggacaccctgatgatctcccggaccccagaggtgacatgcgtggtggtgagcgtgtcccacgaggaccccgaggtgaagtttaactggtacgtggatggcgtggaggtgcacaatgccaagacaaagccccgggaggagcagtacaattctacctatagagtggtgagcgtgctgacagtgctgcaccaggattggctgaacggcaaggagtataagtgtaaggtgagcaataaggccctgccagcccccatcgagaagaccatctccaaggccaagggccagcctcgcgaaccacaggtgtacactctgcctccatctcgggacgagctgactaagaaccaggtcagtctgacctgtctggtgaaaggattctatcccagcgatatcgctgtggagtgggaatccaatggccagcctgagaacaattacaagaccacaccccctgtgctggactctgatggcagtttctttctgtatagtaagctgaccgtcgataaatcacgatggcagcaggggaacgtgttcagctgttcagtgatgcacgaagccctgcacaaccattacacccagaagagcctgagcctgtctcccggc

SEQ ID NO: 240 - protein, 214 aa, Artificial Sequence
  Clone No. 20897
EIVLTQSPATLSLSPGERATLSCKASENVGSYVSWYQQKPGQAPRLLIYGASNRYTGIPARFSGSGSGTDFTLTISSLEPEDFAVYYCGQSYSYPLTFGGGTKVEIKRTVAAPSVFIFPPSDEQLKSGTASVVCLLNNFYPREAKVQWKVDNALQSGNSQESVTEQDSKDSTYSLSSTLTLSKADYEKHKVYACEVTHQGLSSPVTKSFNRGEC

SEQ ID NO: 241 - DNA, 642 bp, Artificial Sequence
  Clone No. 20897
gagatcgtgctgacccagtccccagccacactgtctctgagcccaggagagagggccacactgtcttgcaaggccagcgagaacgtgggcagctacgtgtcctggtatcagcagaagccaggacaggcccctcggctgctgatctacggggccagcaatcggtataccggcatccccgcaagattctccggctctggcagcggcacagactttaccctgacaatcagctccctggagcctgaggatttcgccgtgtactattgtggccagtcctactcttatccactgacctttggcggcggcacaaaggtggagatcaagaggaccgtggcggcgcccagtgtcttcatttttccccctagcgacgaacagctgaagtctgggacagccagtgtggtctgtctgctgaacaacttctaccctagagaggctaaagtgcagtggaaggtcgataacgcactgcagtccggaaattctcaggagagtgtgactgaacaggactcaaaagatagcacctattccctgtcaagcacactgactctgagcaaggccgactacgagaagcataaagtgtatgcttgtgaagtcacccaccaggggctgagttcaccagtcacaaaatcattcaacagaggggagtgc

SEQ ID NO: 242 - protein, 214 aa, Artificial Sequence
  Clone No. 20898
EIVLTQSPATLSLSPGERATLSCKASENVGSYVSWYQQKPGQAPRLLIYGASNRYTGVPARFSGSGSGTDFTLTISSLEPEDFAVYYCGQSYSYPLTFGGGTKVEIKRTVAAPSVFIFPPSDEQLKSGTASVVCLLNNFYPREAKVQWKVDNALQSGNSQESVTEQDSKDSTYSLSSTLTLSKADYEKHKVYACEVTHQGLSSPVTKSFNRGEC

SEQ ID NO: 243 - DNA, 642 bp, Artificial Sequence
  Clone No. 20898
gagatcgtgctgacccagtccccagccacactgtctctgagcccaggagagagggccacactgtcttgcaaggccagcgagaacgtgggcagctacgtgtcctggtatcagcagaagccaggacaggcccctcggctgctgatctacggggccagcaatcggtataccggagtgcccgccagattctccggctctggcagcggcacagactttaccctgacaatcagctccctggagcctgaggatttcgccgtgtactattgtggccagtcctactcttatccactgacctttggcggcggcacaaaggtggagatcaagaggaccgtggcggcgcccagtgtcttcatttttccccctagcgacgaacagctgaagtctgggacagccagtgtggtctgtctgctgaacaacttctaccctagagaggctaaagtgcagtggaaggtcgataacgcactgcagtccggaaattctcaggagagtgtgactgaacaggactcaaaagatagcacctattccctgtcaagcacactgactctgagcaaggccgactacgagaagcataaagtgtatgcttgtgaagtcacccaccaggggctgagttcaccagtcacaaaatcattcaacagaggggagtgc

SEQ ID NO: 244 - protein, 214 aa, Artificial Sequence
  Clone No. 20899
EIVMTQSPATLSLSPGERVTLSCKASENVGSYVSWYQQKPGQAPRLLIYGASNRYTGVPARFSGSGSGTDFTLTISSVEPEDFAVYYCGQSYSYPLTFGGGTKLELKRTVAAPSVFIFPPSDEQLKSGTASVVCLLNNFYPREAKVQWKVDNALQSGNSQESVTEQDSKDSTYSLSSTLTLSKADYEKHKVYACEVTHQGLSSPVTKSFNRGEC

SEQ ID NO: 245 - DNA, 642 bp, Artificial Sequence
  Clone No. 20899
gagatcgtgatgacccagtccccagccacactgtctctgagcccaggagagagggtgacactgtcttgcaaggccagcgagaacgtgggcagctacgtgtcctggtatcagcagaagccaggacaggcccctcggctgctgatctacggggccagcaatcggtataccggagtgcccgccagattctccggctctggcagcggcacagactttaccctgacaatcagctccgtggagcctgaggatttcgccgtgtactattgtggccagtcctactcttatccactgacctttggcggcggcacaaagctggagctgaagaggaccgtggcggcgcccagtgtcttcatttttccccctagcgacgaacagctgaagtctgggacagccagtgtggtctgtctgctgaacaacttctaccctagagaggctaaagtgcagtggaaggtcgataacgcactgcagtccggaaattctcaggagagtgtgactgaacaggactcaaaagatagcacctattccctgtcaagcacactgactctgagcaaggccgactacgagaagcataaagtgtatgcttgtgaagtcacccaccaggggctgagttcaccagtcacaaaatcattcaacagaggggagtgc

SEQ ID NO: 246 - protein, 214 aa, Artificial Sequence
  Clone No. 20900
EIVMTQSPATLSLSPGERVTLSCKASENVGSYVSWYQQKPGQAPRLLIYGASNRYTGVPARFSGSGSGTDFTLTISSVEPEDLAVYYCGQSYSYPLTFGGGTKLELKRTVAAPSVFIFPPSDEQLKSGTASVVCLLNNFYPREAKVQWKVDNALQSGNSQESVTEQDSKDSTYSLSSTLTLSKADYEKHKVYACEVTHQGLSSPVTKSFNRGEC

SEQ ID NO: 247 - DNA, 642 bp, Artificial Sequence
  Clone No. 20900
gagatcgtgatgacccagtccccagccacactgtctctgagcccaggagagagggtgacactgtcttgcaaggccagcgagaacgtgggcagctacgtgtcctggtatcagcagaagccaggacaggcccctcggctgctgatctacggggccagcaatcggtataccggagtgcccgccagattctccggctctggcagcggcacagactttaccctgacaatcagctccgtggagcctgaggatctggccgtgtactattgtggccagtcctactcttatccactgacctttggcggcggcacaaagctggagctgaagaggaccgtggcggcgcccagtgtcttcatttttccccctagcgacgaacagctgaagtctgggacagccagtgtggtctgtctgctgaacaacttctaccctagagaggctaaagtgcagtggaaggtcgataacgcactgcagtccggaaattctcaggagagtgtgactgaacaggactcaaaagatagcacctattccctgtcaagcacactgactctgagcaaggccgactacgagaagcataaagtgtatgcttgtgaagtcacccaccaggggctgagttcaccagtcacaaaatcattcaacagaggggagtgc

SEQ ID NO: 248 - protein, 447 aa, Artificial Sequence
  Clone No. 20901
QVQLQESGPGLVKPSETLSLTCTVSGFSLISYGVHWIRQPPGKGLEWIGVIWSGGSTDYNPSLKSRVTISVDTSKNQFSLKLSSVTAADTAVYYCARNPLTATVMDYWGQGTLVTVSSASTKGPSVFPLAPSSKSTSGGTAALGCLVKDYFPEPVTVSWNSGALTSGVHTFPAVLQSSGLYSLSSVVTVPSSSLGTQTYICNVNHKPSNTKVDKKVEPKSCDKTHTCPPCPAPEAAGGPSVFLFPPKPKDTLMISRTPEVTCVVVSVSHEDPEVKFNWYVDGVEVHNAKTKPREEQYNSTYRVVSVLTVLHQDWLNGKEYKCKVSNKALPAPIEKTISKAKGQPREPQVYTLPPSRDELTKNQVSLTCLVKGFYPSDIAVEWESNGQPENNYKTTPPVLDSDGSFFLYSKLTVDKSRWQQGNVFSCSVMHEALHNHYTQKSLSLSPG

SEQ ID NO: 249 - DNA, 1341 bp, Artificial Sequence
  Clone No. 20901
caggtgcagctgcaggagtccggaccaggactggtgaagccatctgagacactgagcctgacctgcacagtgtccggcttttctctgatcagctacggagtgcactggatcaggcagccacctggcaagggactggagtggatcggcgtgatctggtccggcggctctaccgactataaccccagcctgaagtcccgcgtgaccatctccgtggatacatctaagaatcagttcagcctgaagctgagctccgtgaccgccgccgacacagccgtgtactattgtgcccggaaccctctgaccgccacagtgatggattactggggccagggcaccctggtgacagtgtctagcgctagcacaaagggcccctccgtgtttcctctggccccatcctctaagtccacctctggaggaacagccgccctgggctgtctggtgaaggattacttccctgagccagtgaccgtgtcctggaactctggggccctgaccagcggagtgcacacatttcccgccgtgctgcagagctccggactgtactccctgtctagcgtggtgaccgtgccttcctctagcctgggcacccagacatatatctgcaacgtgaatcacaagccttccaatacaaaggtcgacaagaaggtggagccaaagtcttgtgataagacccacacatgcccaccttgtccggcgccagaggccgccggaggaccaagcgtgttcctgtttccacccaagcccaaggacaccctgatgatctcccggaccccagaggtgacatgcgtggtggtgagcgtgtcccacgaggaccccgaggtgaagtttaactggtacgtggatggcgtggaggtgcacaatgccaagacaaagccccgggaggagcagtacaattctacctatagagtggtgagcgtgctgacagtgctgcaccaggattggctgaacggcaaggagtataagtgtaaggtgagcaataaggccctgccagcccccatcgagaagaccatctccaaggccaagggccagcctcgcgaaccacaggtgtacactctgcctccatctcgggacgagctgactaagaaccaggtcagtctgacctgtctggtgaaaggattctatcccagcgatatcgctgtggagtgggaatccaatggccagcctgagaacaattacaagaccacaccccctgtgctggactctgatggcagtttctttctgtatagtaagctgaccgtcgataaatcacgatggcagcaggggaacgtgttcagctgttcagtgatgcacgaagccctgcacaaccattacacccagaagagcctgagcctgtctcccggc

SEQ ID NO: 250 - protein, 447 aa, Artificial Sequence
  Clone No. 20902
QVQLQESGPGLVKPSETLSLTCTVSGFSLISYGVHWVRQPPGKGLEWLGVIWSGGSTDYNPSLKSRVTISKDTSKNQFSLKLSSVTAADTAVYYCARNPLTATVMDYWGQGTLVTVSSASTKGPSVFPLAPSSKSTSGGTAALGCLVKDYFPEPVTVSWNSGALTSGVHTFPAVLQSSGLYSLSSVVTVPSSSLGTQTYICNVNHKPSNTKVDKKVEPKSCDKTHTCPPCPAPEAAGGPSVFLFPPKPKDTLMISRTPEVTCVVVSVSHEDPEVKFNWYVDGVEVHNAKTKPREEQYNSTYRVVSVLTVLHQDWLNGKEYKCKVSNKALPAPIEKTISKAKGQPREPQVYTLPPSRDELTKNQVSLTCLVKGFYPSDIAVEWESNGQPENNYKTTPPVLDSDGSFFLYSKLTVDKSRWQQGNVFSCSVMHEALHNHYTQKSLSLSPG

SEQ ID NO: 251 - DNA, 1341 bp, Artificial Sequence
  Clone No. 20902
caggtgcagctgcaggagtccggaccaggactggtgaagccatctgagacactgagcctgacctgcacagtgtccggcttttctctgatcagctacggagtgcactgggtgaggcagccacctggcaagggactggagtggctgggcgtgatctggtccggaggctctaccgactataaccccagcctgaagtcccgcgtgaccatctccaaggatacatctaagaatcagttcagcctgaagctgagctccgtgaccgccgccgacacagccgtgtactattgtgcccggaaccctctgaccgccacagtgatggattactggggccagggcaccctggtgacagtgtctagcgctagcacaaagggcccctccgtgtttcctctggccccatcctctaagtccacctctggaggaacagccgccctgggctgtctggtgaaggattacttccctgagccagtgaccgtgtcctggaactctggggccctgaccagcggagtgcacacatttcccgccgtgctgcagagctccggactgtactccctgtctagcgtggtgaccgtgccttcctctagcctgggcacccagacatatatctgcaacgtgaatcacaagccttccaatacaaaggtcgacaagaaggtggagccaaagtcttgtgataagacccacacatgcccaccttgtccggcgccagaggccgccggaggaccaagcgtgttcctgtttccacccaagcccaaggacaccctgatgatctcccggaccccagaggtgacatgcgtggtggtgagcgtgtcccacgaggaccccgaggtgaagtttaactggtacgtggatggcgtggaggtgcacaatgccaagacaaagccccgggaggagcagtacaattctacctatagagtggtgagcgtgctgacagtgctgcaccaggattggctgaacggcaaggagtataagtgtaaggtgagcaataaggccctgccagcccccatcgagaagaccatctccaaggccaagggccagcctcgcgaaccacaggtgtacactctgcctccatctcgggacgagctgactaagaaccaggtcagtctgacctgtctggtgaaaggattctatcccagcgatatcgctgtggagtgggaatccaatggccagcctgagaacaattacaagaccacaccccctgtgctggactctgatggcagtttctttctgtatagtaagctgaccgtcgataaatcacgatggcagcaggggaacgtgttcagctgttcagtgatgcacgaagccctgcacaaccattacacccagaagagcctgagcctgtctcccggc

SEQ ID NO: 252 - protein, 447 aa, Artificial Sequence
  Clone No. 20903
QVQLQESGPGLVKPSETLSITCTVSGFSLISYGVHWVRQPPGKGLEWLGVIWSGGSTDYNPSLKSRVTISKDTSKNQVSFKLSSLTAADTAIYYCARNPLTATVMDYWGQGTLVTVSSASTKGPSVFPLAPSSKSTSGGTAALGCLVKDYFPEPVTVSWNSGALTSGVHTFPAVLQSSGLYSLSSVVTVPSSSLGTQTYICNVNHKPSNTKVDKKVEPKSCDKTHTCPPCPAPEAAGGPSVFLFPPKPKDTLMISRTPEVTCVVVSVSHEDPEVKFNWYVDGVEVHNAKTKPREEQYNSTYRVVSVLTVLHQDWLNGKEYKCKVSNKALPAPIEKTISKAKGQPREPQVYTLPPSRDELTKNQVSLTCLVKGFYPSDIAVEWESNGQPENNYKTTPPVLDSDGSFFLYSKLTVDKSRWQQGNVFSCSVMHEALHNHYTQKSLSLSPG

SEQ ID NO: 253 - DNA, 1341 bp, Artificial Sequence
  Clone No. 20903
caggtgcagctgcaggagtccggaccaggactggtgaagccatctgagacactgagcatcacctgcacagtgtccggcttttctctgatcagctacggagtgcactgggtgaggcagccacctggcaagggactggagtggctgggcgtgatctggtccggaggctctaccgactataaccccagcctgaagtcccgcgtgaccatctccaaggatacatctaagaatcaggtgagcttcaagctgagctccctgaccgccgccgacacagccatctactattgtgcccggaaccctctgaccgccacagtgatggattactggggccagggcaccctggtgacagtgtctagcgctagcacaaagggcccctccgtgtttcctctggccccatcctctaagtccacctctggaggaacagccgccctgggctgtctggtgaaggattacttccctgagccagtgaccgtgtcctggaactctggggccctgaccagcggagtgcacacatttcccgccgtgctgcagagctccggactgtactccctgtctagcgtggtgaccgtgccttcctctagcctgggcacccagacatatatctgcaacgtgaatcacaagccttccaatacaaaggtcgacaagaaggtggagccaaagtcttgtgataagacccacacatgcccaccttgtccggcgccagaggccgccggaggaccaagcgtgttcctgtttccacccaagcccaaggacaccctgatgatctcccggaccccagaggtgacatgcgtggtggtgagcgtgtcccacgaggaccccgaggtgaagtttaactggtacgtggatggcgtggaggtgcacaatgccaagacaaagccccgggaggagcagtacaattctacctatagagtggtgagcgtgctgacagtgctgcaccaggattggctgaacggcaaggagtataagtgtaaggtgagcaataaggccctgccagcccccatcgagaagaccatctccaaggccaagggccagcctcgcgaaccacaggtgtacactctgcctccatctcgggacgagctgactaagaaccaggtcagtctgacctgtctggtgaaaggattctatcccagcgatatcgctgtggagtgggaatccaatggccagcctgagaacaattacaagaccacaccccctgtgctggactctgatggcagtttctttctgtatagtaagctgaccgtcgataaatcacgatggcagcaggggaacgtgttcagctgttcagtgatgcacgaagccctgcacaaccattacacccagaagagcctgagcctgtctcccggc

SEQ ID NO: 254 - protein, 447 aa, Artificial Sequence
  Clone No. 20904
QVQLQESGPGLVKPSETLSITCTVSGFSLISYGVHWVRQPPGKGLEWLGVIWSGGSTDYNPSLKSRVTISKDNSKNQVSFKLSSLTAADTAIYYCARNPLTATVMDYWGQGTLVTVSSASTKGPSVFPLAPSSKSTSGGTAALGCLVKDYFPEPVTVSWNSGALTSGVHTFPAVLQSSGLYSLSSVVTVPSSSLGTQTYICNVNHKPSNTKVDKKVEPKSCDKTHTCPPCPAPEAAGGPSVFLFPPKPKDTLMISRTPEVTCVVVSVSHEDPEVKFNWYVDGVEVHNAKTKPREEQYNSTYRVVSVLTVLHQDWLNGKEYKCKVSNKALPAPIEKTISKAKGQPREPQVYTLPPSRDELTKNQVSLTCLVKGFYPSDIAVEWESNGQPENNYKTTPPVLDSDGSFFLYSKLTVDKSRWQQGNVFSCSVMHEALHNHYTQKSLSLSPG

SEQ ID NO: 255 - DNA, 1341 bp, Artificial Sequence
  Clone No. 20904
caggtgcagctgcaggagtccggaccaggactggtgaagccatctgagacactgagcatcacctgcacagtgtccggcttttctctgatcagctacggagtgcactgggtgaggcagccacctggcaagggactggagtggctgggcgtgatctggtccggaggctctaccgactataaccccagcctgaagtcccgcgtgacaatctccaaggataactctaagaatcaggtgagcttcaagctgagctccctgaccgccgccgacacagccatctactattgtgcccggaatcctctgaccgccacagtgatggattactggggccagggcaccctggtgacagtgtctagcgctagcacaaagggcccctccgtgtttcctctggccccatcctctaagtccacctctggaggaacagccgccctgggctgtctggtgaaggattacttccctgagccagtgaccgtgtcctggaactctggggccctgaccagcggagtgcacacatttcccgccgtgctgcagagctccggactgtactccctgtctagcgtggtgaccgtgccttcctctagcctgggcacccagacatatatctgcaacgtgaatcacaagccttccaatacaaaggtcgacaagaaggtggagccaaagtcttgtgataagacccacacatgcccaccttgtccggcgccagaggccgccggaggaccaagcgtgttcctgtttccacccaagcccaaggacaccctgatgatctcccggaccccagaggtgacatgcgtggtggtgagcgtgtcccacgaggaccccgaggtgaagtttaactggtacgtggatggcgtggaggtgcacaatgccaagacaaagccccgggaggagcagtacaattctacctatagagtggtgagcgtgctgacagtgctgcaccaggattggctgaacggcaaggagtataagtgtaaggtgagcaataaggccctgccagcccccatcgagaagaccatctccaaggccaagggccagcctcgcgaaccacaggtgtacactctgcctccatctcgggacgagctgactaagaaccaggtcagtctgacctgtctggtgaaaggattctatcccagcgatatcgctgtggagtgggaatccaatggccagcctgagaacaattacaagaccacaccccctgtgctggactctgatggcagtttctttctgtatagtaagctgaccgtcgataaatcacgatggcagcaggggaacgtgttcagctgttcagtgatgcacgaagccctgcacaaccattacacccagaagagcctgagcctgtctcccggc

SEQ ID NO: 256 - protein, 214 aa, Artificial Sequence
  Clone No. 20905
DIQMTQSPSSLSASVGDRVTITCRASQNVGTNVAWFQQKPGKAPKSLIYSASYRDSGVPSRFSGSGSGTDFTLTISSLQPEDFATYYCQQYNSYPLTFGGGTKVEIKRTVAAPSVFIFPPSDEQLKSGTASVVCLLNNFYPREAKVQWKVDNALQSGNSQESVTEQDSKDSTYSLSSTLTLSKADYEKHKVYACEVTHQGLSSPVTKSFNRGEC

SEQ ID NO: 257 - DNA, 642 bp, Artificial Sequence
  Clone No. 20905
gacatccagatgacacagtccccaagctccctgtccgcctctgtgggcgatagggtgaccatcacatgcagagcctctcagaacgtgggcaccaatgtggcctggtttcagcagaagcccggcaaggcccctaagtccctgatctacagcgcctcctatagggactctggagtgcctagccgcttctctggcagcggctccggaaccgactttaccctgacaatctctagcctgcagcctgaggatttcgccacatactattgtcagcagtacaacagctatccactgacctttggcggcggcacaaaggtggagatcaagcggacagtggcggcgcccagtgtcttcatttttccccctagcgacgaacagctgaagtctgggacagccagtgtggtctgtctgctgaacaacttctaccctagagaggctaaagtgcagtggaaggtcgataacgcactgcagtccggaaattctcaggagagtgtgactgaacaggactcaaaagatagcacctattccctgtcaagcacactgactctgagcaaggccgactacgagaagcataaagtgtatgcttgtgaagtcacccaccaggggctgagttcaccagtcacaaaatcattcaacagaggggagtgc

SEQ ID NO: 258 - protein, 214 aa, Artificial Sequence
  Clone No. 20906
DIQMTQSPSSLSASVGDRVTITCRASQNVGTNVAWYQQKPGKAPKALIYSASYRDSGVPSRFSGSGSGTDFTLTISSLQPEDFATYYCQQYNSYPLTFGGGTKVEIKRTVAAPSVFIFPPSDEQLKSGTASVVCLLNNFYPREAKVQWKVDNALQSGNSQESVTEQDSKDSTYSLSSTLTLSKADYEKHKVYACEVTHQGLSSPVTKSFNRGEC

SEQ ID NO: 259 - DNA, 642 bp, Artificial Sequence
  Clone No. 20906
gacatccagatgacacagtccccaagctccctgtccgcctctgtgggcgatagggtgaccatcacatgcagagcctctcagaacgtgggcaccaatgtggcctggtaccagcagaagcccggcaaggcccctaaggccctgatctacagcgcctcctatagggactctggagtgcctagccgcttctctggcagcggctccggaaccgactttaccctgacaatctctagcctgcagcctgaggatttcgccacatactattgtcagcagtacaactcctatccactgacctttggcggcggcacaaaggtggagatcaagcggacagtggcggcgcccagtgtcttcatttttccccctagcgacgaacagctgaagtctgggacagccagtgtggtctgtctgctgaacaacttctaccctagagaggctaaagtgcagtggaaggtcgataacgcactgcagtccggaaattctcaggagagtgtgactgaacaggactcaaaagatagcacctattccctgtcaagcacactgactctgagcaaggccgactacgagaagcataaagtgtatgcttgtgaagtcacccaccaggggctgagttcaccagtcacaaaatcattcaacagaggggagtgc

SEQ ID NO: 260 - protein, 214 aa, Artificial Sequence
  Clone No. 20907
DIQMTQSPSSLSASVGDRVTVTCRASQNVGTNVAWYQQKPGKAPKALIYSASYRDSGVPSRFSGSGSGTDFTLTISSVQPEDFATYYCQQYNSYPLTFGGGTKLEIKRTVAAPSVFIFPPSDEQLKSGTASVVCLLNNFYPREAKVQWKVDNALQSGNSQESVTEQDSKDSTYSLSSTLTLSKADYEKHKVYACEVTHQGLSSPVTKSFNRGEC

SEQ ID NO: 261 - DNA, 642 bp, Artificial Sequence
  Clone No. 20907
gacatccagatgacacagtccccaagctccctgtccgcctctgtgggcgatagggtgaccgtgacatgcagagcctctcagaacgtgggcaccaatgtggcctggtaccagcagaagcccggcaaggcccctaaggccctgatctacagcgcctcctatagggactctggagtgcctagccgcttctctggcagcggctccggaaccgactttaccctgacaatctctagcgtgcagcctgaggatttcgccacatactattgtcagcagtacaactcctatccactgacctttggcggcggcacaaagctggagatcaagcggacagtggcggcgcccagtgtcttcatttttccccctagcgacgaacagctgaagtctgggacagccagtgtggtctgtctgctgaacaacttctaccctagagaggctaaagtgcagtggaaggtcgataacgcactgcagtccggaaattctcaggagagtgtgactgaacaggactcaaaagatagcacctattccctgtcaagcacactgactctgagcaaggccgactacgagaagcataaagtgtatgcttgtgaagtcacccaccaggggctgagttcaccagtcacaaaatcattcaacagaggggagtgc

SEQ ID NO: 262 - protein, 214 aa, Artificial Sequence
  Clone No. 20908
DIQMTQSPSSLSASVGDRVTVTCRASQNVGTNVAWYQQKPGKAPKALIYSASYRDSGVPSRFSGSGSGTDFTLTISSVQPEDLATYYCQQYNSYPLTFGGGTKLEIKRTVAAPSVFIFPPSDEQLKSGTASVVCLLNNFYPREAKVQWKVDNALQSGNSQESVTEQDSKDSTYSLSSTLTLSKADYEKHKVYACEVTHQGLSSPVTKSFNRGEC

SEQ ID NO: 263 - DNA, 642 bp, Artificial Sequence
  Clone No. 20908
gacatccagatgacacagtccccaagctccctgtccgcctctgtgggcgatagggtgaccgtgacatgcagagcctctcagaacgtgggcaccaatgtggcctggtaccagcagaagcccggcaaggcccctaaggccctgatctacagcgcctcctatagggactctggagtgcctagccgcttctctggcagcggctccggaaccgactttaccctgacaatctctagcgtgcagcctgaggatctggccacatactattgtcagcagtacaactcctatccactgacctttggcggcggcacaaagctggagatcaagcggacagtggcggcgcccagtgtcttcatttttccccctagcgacgaacagctgaagtctgggacagccagtgtggtctgtctgctgaacaacttctaccctagagaggctaaagtgcagtggaaggtcgataacgcactgcagtccggaaattctcaggagagtgtgactgaacaggactcaaaagatagcacctattccctgtcaagcacactgactctgagcaaggccgactacgagaagcataaagtgtatgcttgtgaagtcacccaccaggggctgagttcaccagtcacaaaatcattcaacagaggggagtgc

SEQ ID NO: 264 - protein, 689 aa, Artificial Sequence
  Clone No. 16833
EVQLVQSGAEVKKPGESLRISCKGSGYSFSTYWISWVRQMPGKGLEWMGKIYPGDSYTNYSPSFQGQVTISADKSISTAYLQWSSLKASDTAMYYCARGYGIFDYWGQGTLVTVSSASTKGPSVFPLAPSSKSTSGGTAALGCLVKDYFPEPVTVSWNSGALTSGVHTFPAVLQSSGLYSLSSVVTVPSSSLGTQTYICNVNHKPSNTKVDKKVEPKSCDKTHTCPPCPAPEAAGGPSVFLFPPKPKDTLMISRTPEVTCVVVSVSHEDPEVKFNWYVDGVEVHNAKTKPREEQYNSTYRVVSVLTVLHQDWLNGKEYKCKVSNKALPAPIEKTISKAKGQPREPQVYVLPPSRDELTKNQVSLLCLVKGFYPSDIAVEWESNGQPENNYLTWPPVLDSDGSFFLYSKLTVDKSRWQQGNVFSCSVMHEALHNHYTQKSLSLSPGGGGGQVQLVQSGAEVKKPGASVKVSCKASGYSFTGYTMNWVRQAPGQGLEWMGLITPYNGASSYNQKFRGKATMTVDTSTSTVYMELSSLRSEDTAVYYCARGGYDGRGFDYWGQGTLVTVSSGGGGSGGGGSGGGGSDIQMTQSPSSLSASVGDRVTITCSASSSVSYMHWYQQKSGKAPKLLIYDTSKLASGVPSRFSGSGSGTDFTLTISSLQPEDFATYYCQQWSKHPLTFGQGTKLEIK

SEQ ID NO: 265 - DNA, 2067 bp, Artificial Sequence
  Clone No. 16833
gaggtgcagctggtgcagagcggagcagaggtgaagaagccaggcgagtccctgaggatctcttgcaagggcagcggctacagcttctccacctattggatctcctgggtgcgccagatgcctggcaagggactggagtggatgggcaagatctaccccggcgacagctacacaaactattctcctagctttcagggccaggtgaccatctccgccgataagtccatctctacagcctatctgcagtggagctccctgaaggccagcgacaccgccatgtactattgcgccagaggctacggcatcttcgattattggggccagggcaccctggtgacagtgtctagcgctagcacaaagggcccaagcgtgtttcctctggccccatcctctaagagcacctccggaggaacagccgccctgggctgtctggtgaaggactacttccctgagccagtgaccgtgtcctggaactctggggccctgaccagcggagtgcacacatttcccgccgtgctgcagagctccggactgtactccctgtctagcgtggtgaccgtgccttcctctagcctgggcacccagacatatatctgcaacgtgaatcacaagccttctaatacaaaggtcgacaagaaggtggagccaaagagctgtgataagacccacacatgcccaccttgtccggcgccagaggccgccggaggaccaagcgtgttcctgtttccacccaagcccaaggacaccctgatgatctccaggacccctgaggtgacatgcgtggtggtgtctgtgagccacgaggacccagaggtgaagttcaactggtacgtggatggcgtggaggtgcacaatgccaagacaaagcccagagaggagcagtacaattccacctatcgcgtggtgtctgtgctgacagtgctgcaccaggattggctgaacggcaaggagtataagtgcaaggtgtccaataaggccctgccagcccccatcgagaagaccatctctaaggccaagggccagcctcgcgaaccacaggtgtacgtgctgcccccttccagggacgagctgaccaagaaccaggtgtctctgctgtgcctggtgaagggcttctatccctctgatatcgccgtggagtgggagagcaatggccagcctgagaacaattacctgacatggccacccgtgctggactccgatggctctttctttctgtatagcaagctgaccgtggacaagtcccgctggcagcagggcaacgtgttttcctgctctgtgatgcacgaggccctgcacaatcactacacccagaagagcctgagcttaagcccaggaggaggaggaggacaggtgcagctggtgcagtccggagccgaggtgaagaagcctggggccagcgtgaaggtgagctgtaaggccagcggctactccttcacaggctataccatgaactgggtgcggcaggcccctggacagggactggagtggatgggcctgatcacaccatacaacggggccagctcctataatcagaagtttaggggcaaggccaccatgacagtggacaccagcacatccaccgtgtatatggagctgtctagcctgcgcagcgaggataccgccgtgtactattgcgccagaggcggatacgacggcagaggcttcgattattggggccagggcacactggtgaccgtgtcctctggaggaggaggctccggcggaggaggctctggcggcggcggcagcgacatccagatgacacagtcccctagctccctgtctgccagcgtgggcgatagggtgacaatcacctgttccgcctctagctccgtgtcttacatgcactggtatcagcagaagagcggcaaggccccaaagctgctgatctacgatacctccaagctggcctctggcgtgcccagcagattctccggctctggcagcggcacagactttacactgaccatctctagcctgcagcctgaggatttcgccacctactattgtcagcagtggagcaagcacccactgacatttggccagggcaccaagctggagatcaag

SEQ ID NO: 266 - protein, 690 aa, Artificial Sequence
  Clone No. 16839
EVQLVQSGAEVKKPGESLRISCKGSGYSFSTYWISWVRQMPGKGLEWMGKIYPGDSYTNYSPSFQGQVTISADKSISTAYLQWSSLKASDTAMYYCARGYGIFDYWGQGTLVTVSSASTKGPSVFPLAPSSKSTSGGTAALGCLVKDYFPEPVTVSWNSGALTSGVHTFPAVLQSSGLYSLSSVVTVPSSSLGTQTYICNVNHKPSNTKVDKKVEPKSCDKTHTCPPCPAPEAAGGPSVFLFPPKPKDTLMISRTPEVTCVVVSVSHEDPEVKFNWYVDGVEVHNAKTKPREEQYNSTYRVVSVLTVLHQDWLNGKEYKCKVSNKALPAPIEKTISKAKGQPREPQVYVLPPSRDELTKNQVSLLCLVKGFYPSDIAVEWESNGQPENNYLTWPPVLDSDGSFFLYSKLTVDKSRWQQGNVFSCSVMHEALHNHYTQKSLSLSPGGGGGQVQLVQSGAEVVKPGASVKMSCKASGYTFTGYNIHWVKQAPGQGLEWIGAIYPGNGDTSYKQKFRGRATLTADTSTSTVYMELSSLRSEDSAVYYCARGETARATFAYWGQGTLVTVSSGGGGSGGGGSGGGGSDIQMTQSPSSLSASVGDRVTITCSASQDIGNFLNWYQQKPGKTVKVLIYYTSSLYSGVPSRFSGSGSGTDYTLTISSLQPEDFATYYCQQYSKLPLTFGQGTKLELK

SEQ ID NO: 267 - DNA, 2070 bp, Artificial Sequence
  Clone No. 16839
gaggtgcagctggtgcagagcggagcagaggtgaagaagccaggcgagtccctgaggatctcttgcaagggcagcggctacagcttctccacctattggatctcctgggtgcgccagatgcctggcaagggactggagtggatgggcaagatctaccccggcgacagctacacaaactattctcctagctttcagggccaggtgaccatctccgccgataagtccatctctacagcctatctgcagtggagctccctgaaggccagcgacaccgccatgtactattgcgccagaggctacggcatcttcgattattggggccagggcaccctggtgacagtgtctagcgctagcacaaagggcccaagcgtgtttcctctggccccatcctctaagagcacctccggaggaacagccgccctgggctgtctggtgaaggactacttccctgagccagtgaccgtgtcctggaactctggggccctgaccagcggagtgcacacatttcccgccgtgctgcagagctccggactgtactccctgtctagcgtggtgaccgtgccttcctctagcctgggcacccagacatatatctgcaacgtgaatcacaagccttctaatacaaaggtcgacaagaaggtggagccaaagagctgtgataagacccacacatgcccaccttgtccggcgccagaggccgccggaggaccaagcgtgttcctgtttccacccaagcccaaggacaccctgatgatctccaggacccctgaggtgacatgcgtggtggtgtctgtgagccacgaggacccagaggtgaagttcaactggtacgtggatggcgtggaggtgcacaatgccaagacaaagcccagagaggagcagtacaattccacctatcgcgtggtgtctgtgctgacagtgctgcaccaggattggctgaacggcaaggagtataagtgcaaggtgtccaataaggccctgccagcccccatcgagaagaccatctctaaggccaagggccagcctcgcgaaccacaggtgtacgtgctgcccccttccagggacgagctgaccaagaaccaggtgtctctgctgtgcctggtgaagggcttctatccctctgatatcgccgtggagtgggagagcaatggccagcctgagaacaattacctgacatggccacccgtgctggacagcgatggctccttctttctgtatagcaagctgaccgtggacaagtcccgctggcagcagggcaacgtgttttcctgctctgtgatgcacgaggccctgcacaatcactacacacagaagagcctgagcttaagccctggaggaggaggaggacaggtgcagctggtgcagagcggagccgaggtggtgaagccaggggccagcgtgaagatgtcttgtaaggccagcggctacaccttcacaggctataacatccactgggtgaagcaggcccctggacagggactggagtggatcggagccatctacccaggcaatggcgacacctcctataagcagaagtttcggggcagagccaccctgacagccgataccagcacatccaccgtgtacatggagctgagctccctgcggtctgaggacagcgccgtgtactattgcgccaggggcgagacagcaagggccaccttcgcctattggggacagggcacactggtgaccgtgtctagcggaggaggaggcagcggaggaggaggctccggcggcggcggctctgatatccagatgacccagagcccttcctctctgtctgccagcgtgggcgacagggtgacaatcacctgttccgcctctcaggatatcggcaacttcctgaattggtaccagcagaagcccggcaagacagtgaaggtgctgatctactataccagctccctgtactccggagtgcctagccggttcagcggctccggctctggaacagactatacactgaccatctctagcctgcagccagaggatttcgccacctactattgtcagcagtattccaagctgcccctgacatttggccagggcaccaagctggagctgaag

SEQ ID NO: 268 - protein, 690 aa, Artificial Sequence
  Clone No. 16840
EVQLVQSGAEVKKPGESLRISCKGSGYSFSTYWISWVRQMPGKGLEWMGKIYPGDSYTNYSPSFQGQVTISADKSISTAYLQWSSLKASDTAMYYCARGYGIFDYWGQGTLVTVSSASTKGPSVFPLAPSSKSTSGGTAALGCLVKDYFPEPVTVSWNSGALTSGVHTFPAVLQSSGLYSLSSVVTVPSSSLGTQTYICNVNHKPSNTKVDKKVEPKSCDKTHTCPPCPAPEAAGGPSVFLFPPKPKDTLMISRTPEVTCVVVSVSHEDPEVKFNWYVDGVEVHNAKTKPREEQYNSTYRVVSVLTVLHQDWLNGKEYKCKVSNKALPAPIEKTISKAKGQPREPQVYVLPPSRDELTKNQVSLLCLVKGFYPSDIAVEWESNGQPENNYLTWPPVLDSDGSFFLYSKLTVDKSRWQQGNVFSCSVMHEALHNHYTQKSLSLSPGGGGGDIQMTQSPSSLSASVGDRVTITCSASQDIGNFLNWYQQKPGKTVKVLIYYTSSLYSGVPSRFSGSGSGTDYTLTISSLQPEDFATYYCQQYSKLPLTFGQGTKLELKGGGGSGGGGSGGGGSQVQLVQSGAEVVKPGASVKMSCKASGYTFTGYNIHWVKQAPGQGLEWIGAIYPGNGDTSYKQKFRGRATLTADTSTSTVYMELSSLRSEDSAVYYCARGETARATFAYWGQGTLVTVSS

SEQ ID NO: 269 - DNA, 2070 bp, Artificial Sequence
  Clone No. 16840
gaggtgcagctggtgcagagcggagcagaggtgaagaagccaggcgagtccctgaggatctcttgcaagggcagcggctacagcttctccacctattggatctcctgggtgcgccagatgcctggcaagggactggagtggatgggcaagatctaccccggcgacagctacacaaactattctcctagctttcagggccaggtgaccatctccgccgataagtccatctctacagcctatctgcagtggagctccctgaaggccagcgacaccgccatgtactattgcgccagaggctacggcatcttcgattattggggccagggcaccctggtgacagtgtctagcgctagcacaaagggcccaagcgtgtttcctctggccccatcctctaagagcacctccggaggaacagccgccctgggctgtctggtgaaggactacttccctgagccagtgaccgtgtcctggaactctggggccctgaccagcggagtgcacacatttcccgccgtgctgcagagctccggactgtactccctgtctagcgtggtgaccgtgccttcctctagcctgggcacccagacatatatctgcaacgtgaatcacaagccttctaatacaaaggtcgacaagaaggtggagccaaagagctgtgataagacccacacatgcccaccttgtccggcgccagaggccgccggaggaccaagcgtgttcctgtttccacccaagcccaaggacaccctgatgatctccaggacccctgaggtgacatgcgtggtggtgtctgtgagccacgaggacccagaggtgaagttcaactggtacgtggatggcgtggaggtgcacaatgccaagacaaagcccagagaggagcagtacaattccacctatcgcgtggtgtctgtgctgacagtgctgcaccaggattggctgaacggcaaggagtataagtgcaaggtgtccaataaggccctgccagcccccatcgagaagaccatctctaaggccaagggccagcctcgcgaaccacaggtgtacgtgctgcccccttccagggacgagctgaccaagaaccaggtgtctctgctgtgcctggtgaagggcttctatccctctgatatcgccgtggagtgggagagcaatggccagcctgagaacaattacctgacatggccacccgtgctggacagcgatggctccttctttctgtatagcaagctgaccgtggacaagtcccgctggcagcagggcaacgtgttttcctgctctgtgatgcacgaggccctgcacaatcactacacacagaagagcctgagcttaagcccaggaggaggaggaggcgatatccagatgacccagagcccaagctccctgagcgcctccgtgggcgaccgggtgaccatcacatgttctgccagccaggatatcggcaacttcctgaattggtatcagcagaagcccggcaagacagtgaaggtgctgatctactatacctctagcctgtactccggcgtgccttctagattttccggctctggcagcggcacagactataccctgacaatctcctctctgcagcctgaggatttcgccacctactattgccagcagtacagcaagctgccactgacatttggccagggcaccaagctggagctgaagggaggaggaggcagcggcggcggaggctccggcggcggcggctctcaggtgcagctggtgcagtccggagccgaggtggtgaagcctggggccagcgtgaagatgtcctgtaaggcctctggctacaccttcacaggctataacatccactgggtgaagcaggcccctggacagggactggagtggatcggagccatctacccaggcaatggcgacacctcctataagcagaagtttcggggcagagccaccctgacagccgatacctccacatctaccgtgtacatggagctgagctccctgcggtctgaggacagcgccgtgtactattgtgccaggggcgagacagcaagggccaccttcgcctattggggacagggcacactggtgaccgtgtctagc

SEQ ID NO: 270 - protein, 696 aa, Artificial Sequence
  Clone No. 16841
EVQLVQSGAEVKKPGESLRISCKGSGYSFSTYWISWVRQMPGKGLEWMGKIYPGDSYTNYSPSFQGQVTISADKSISTAYLQWSSLKASDTAMYYCARGYGIFDYWGQGTLVTVSSASTKGPSVFPLAPSSKSTSGGTAALGCLVKDYFPEPVTVSWNSGALTSGVHTFPAVLQSSGLYSLSSVVTVPSSSLGTQTYICNVNHKPSNTKVDKKVEPKSCDKTHTCPPCPAPEAAGGPSVFLFPPKPKDTLMISRTPEVTCVVVSVSHEDPEVKFNWYVDGVEVHNAKTKPREEQYNSTYRVVSVLTVLHQDWLNGKEYKCKVSNKALPAPIEKTISKAKGQPREPQVYVLPPSRDELTKNQVSLLCLVKGFYPSDIAVEWESNGQPENNYLTWPPVLDSDGSFFLYSKLTVDKSRWQQGNVFSCSVMHEALHNHYTQKSLSLSPGGGGGEVQLVESGGGLVQPGGSLRLSCAASGFSFSDFAMSWVRQAPGKGLEWVATIGRVAFHTYYPDSMKGRFTISRDNSKNTLYLQMNSLRAEDTAVYYCARHRGFDVGHFDFWGQGTLVTVSSGGGGSGGGGSGGGGSDIQMTQSPSSLSASVGDRVTITCRSSETLVHSSGNTYLEWYQQKPGKAPKLLIYRVSNRFSGVPSRFSGSGSGTDFTLTISSLQPEDFATYYCFQGSFNPLTFGQGTKVEIK

SEQ ID NO: 271 - DNA, 2088 bp, Artificial Sequence
  Clone No. 16841
gaggtgcagctggtgcagagcggagcagaggtgaagaagccaggcgagtccctgaggatctcttgcaagggcagcggctacagcttctccacctattggatctcctgggtgcgccagatgcctggcaagggactggagtggatgggcaagatctaccccggcgacagctacacaaactattctcctagctttcagggccaggtgaccatctccgccgataagtccatctctacagcctatctgcagtggagctccctgaaggccagcgacaccgccatgtactattgcgccagaggctacggcatcttcgattattggggccagggcaccctggtgacagtgtctagcgctagcacaaagggcccaagcgtgtttcctctggccccatcctctaagagcacctccggaggaacagccgccctgggctgtctggtgaaggactacttccctgagccagtgaccgtgtcctggaactctggggccctgaccagcggagtgcacacatttcccgccgtgctgcagagctccggactgtactccctgtctagcgtggtgaccgtgccttcctctagcctgggcacccagacatatatctgcaacgtgaatcacaagccttctaatacaaaggtcgacaagaaggtggagccaaagagctgtgataagacccacacatgcccaccttgtccggcgccagaggccgccggaggaccaagcgtgttcctgtttccacccaagcccaaggacaccctgatgatctccaggacccctgaggtgacatgcgtggtggtgtctgtgagccacgaggacccagaggtgaagttcaactggtacgtggatggcgtggaggtgcacaatgccaagacaaagcccagagaggagcagtacaattccacctatcgcgtggtgtctgtgctgacagtgctgcaccaggattggctgaacggcaaggagtataagtgcaaggtgtccaataaggccctgccagcccccatcgagaagaccatctctaaggccaagggccagcctcgcgaacctcaggtgtacgtgctgccacctagccgggacgagctgaccaagaaccaggtgtccctgctgtgcctggtgaagggcttctatccctccgatatcgccgtggagtgggagtctaatggccagcctgagaacaattacctgacctggccacccgtgctggactccgatggctctttctttctgtattctaagctgacagtggacaagagcaggtggcagcagggcaacgtgttttcctgctctgtgatgcacgaggccctgcacaatcactacacccagaagagcctgagcttaagccctggaggaggaggaggagaggtgcagctggtggagagcggcggcggcctggtgcagccaggcggcagcctgcgcctgtcctgtgccgcctctggcttcagcttttccgacttcgccatgagctgggtgcggcaggcccccggcaagggactggagtgggtggccaccatcggcagagtggccttccacacatactatcctgactctatgaagggccggtttaccatcagcagagataactccaagaatacactgtatctgcagatgaacagcctgcgggccgaggataccgccgtgtactattgcgcaaggcacagaggctttgacgtgggacacttcgatttttggggccagggcaccctggtgacagtgagctccggcggcggcggctctggaggaggaggcagcggcggaggaggctccgacatccagatgacacagtccccatctagcctgtctgccagcgtgggcgatagggtgaccatcacatgtcgctcctctgagaccctggtgcacagctccggcaacacatacctggagtggtatcagcagaagcctggcaaggccccaaagctgctgatctacagggtgtctaatcgcttcagcggcgtgccctccagattttccggctctggcagcggaaccgacttcaccctgacaatctctagcctgcagccagaggattttgccacatactattgtttccagggcagctttaatcccctgaccttcggccagggcacaaaggtggagatcaag

SEQ ID NO: 272 - protein, 693 aa, Artificial Sequence
  Clone No. 16843
EVQLVQSGAEVKKPGESLRISCKGSGYSFSTYWISWVRQMPGKGLEWMGKIYPGDSYTNYSPSFQGQVTISADKSISTAYLQWSSLKASDTAMYYCARGYGIFDYWGQGTLVTVSSASTKGPSVFPLAPSSKSTSGGTAALGCLVKDYFPEPVTVSWNSGALTSGVHTFPAVLQSSGLYSLSSVVTVPSSSLGTQTYICNVNHKPSNTKVDKKVEPKSCDKTHTCPPCPAPEAAGGPSVFLFPPKPKDTLMISRTPEVTCVVVSVSHEDPEVKFNWYVDGVEVHNAKTKPREEQYNSTYRVVSVLTVLHQDWLNGKEYKCKVSNKALPAPIEKTISKAKGQPREPQVYVLPPSRDELTKNQVSLLCLVKGFYPSDIAVEWESNGQPENNYLTWPPVLDSDGSFFLYSKLTVDKSRWQQGNVFSCSVMHEALHNHYTQKSLSLSPGGGGGQVQLVQSGAEVVKPGASVKISCKASGYTFTGYFMNWVKQSPGQSLEWIGRIHPYDGDTFYNQKFQGKATLTVDKSSNTAHMELLSLTSEDFAVYYCTRYDGSRAMDYWGQGTTVTVSSGGGGSGGGGSGGGGSDIVLTQSPLSLAVSLGQPAIISCKASQSVSFAGTSLMHWYHQKPGQQPRLLIYRASNLEAGVPDRFSGSGSKTDFTLTISPVEAEDAATYYCQQSREYPYTFGGGTKLEIK

SEQ ID NO: 273 - DNA, 2079 bp, Artificial Sequence
  Clone No. 16843
gaggtgcagctggtgcagagcggagcagaggtgaagaagccaggcgagtccctgaggatctcttgcaagggcagcggctacagcttctccacctattggatctcctgggtgcgccagatgcctggcaagggactggagtggatgggcaagatctaccccggcgacagctacacaaactattctcctagctttcagggccaggtgaccatctccgccgataagtccatctctacagcctatctgcagtggagctccctgaaggccagcgacaccgccatgtactattgcgccagaggctacggcatcttcgattattggggccagggcaccctggtgacagtgtctagcgctagcacaaagggcccaagcgtgtttcctctggccccatcctctaagagcacctccggaggaacagccgccctgggctgtctggtgaaggactacttccctgagccagtgaccgtgtcctggaactctggggccctgaccagcggagtgcacacatttcccgccgtgctgcagagctccggactgtactccctgtctagcgtggtgaccgtgccttcctctagcctgggcacccagacatatatctgcaacgtgaatcacaagccttctaatacaaaggtcgacaagaaggtggagccaaagagctgtgataagacccacacatgcccaccttgtccggcgccagaggccgccggaggaccaagcgtgttcctgtttccacccaagcccaaggacaccctgatgatctccaggacccctgaggtgacatgcgtggtggtgtctgtgagccacgaggacccagaggtgaagttcaactggtacgtggatggcgtggaggtgcacaatgccaagacaaagcccagagaggagcagtacaattccacctatcgcgtggtgtctgtgctgacagtgctgcaccaggattggctgaacggcaaggagtataagtgcaaggtgtccaataaggccctgccagcccccatcgagaagaccatctctaaggccaagggccagcctcgcgaaccccaggtgtacgtgctgcccccttctagggacgagctgaccaagaaccaggtgagcctgctgtgcctggtgaagggcttctatccttccgatatcgccgtggagtgggagtctaatggccagccagagaacaattacctgacctggccacccgtgctggacagcgatggctccttctttctgtattctaagctgacagtggacaagagccgctggcagcagggcaacgtgttttcctgctctgtgatgcacgaggccctgcacaatcactacacccagaagagcctgagcttaagcccaggaggaggaggaggacaggtgcagctggtgcagtccggagccgaggtggtgaagcctggggccagcgtgaagatctcctgtaaggcctctggctacaccttcacaggctacttcatgaactgggtgaagcagagcccaggccagtccctggagtggatcggcagaatccacccctacgacggcgatacattctataaccagaagtttcagggcaaggccaccctgaccgtggacaaaagctccaataccgcccacatggagctgctgtctctgacaagcgaggatttcgccgtgtactattgcacccggtacgacggcagcagagccatggattattggggccagggcaccacagtgacagtgtctagcggcggcggcggctctggaggaggaggcagcggcggaggaggctccgacatcgtgctgacccagtccccactgtctctggccgtgagcctgggccagcctgccatcatctcctgtaaggccagccagagcgtgagcttcgccgggaccagcctgatgcactggtaccaccagaagcctggccagcagccaaggctgctgatctatagggccagcaatctggaggccggagtgccagaccggttcagcggctccggctctaagaccgacttcaccctgacaatctcccctgtggaggcagaggatgcagcaacatactattgtcagcagtctagagagtacccatatacctttggcggcggcacaaagctggagatcaag

SEQ ID NO: 274 - protein, 216 aa, Artificial Sequence
  Clone No. 8653
QSVLTQPPSASGTPGQRVTISCSGSSSNIGTNYVYWYQQFPGTAPKLLIYRSYQRPSGVPDRFSGSKSGSSASLAISGLQSEDEADYYCATWDDSLDGWVFGGGTKLTVLRQPKAAPSVTLFPPSSEELQANKATLVCLISDFYPGAVTVAWKADSSPVKAGVETTTPSKQSNNKYAASSYLSLTPEQWKSHRSYSCQVTHEGSTVEKTVAPTECS

SEQ ID NO: 275 - DNA, 648 bp, Artificial Sequence
  Clone No. 8653
cagagcgtcctgactcagcctccctccgcctccggaacacctgggcagagagtgactatctcctgtagcggatcaagctcaaacattggaaccaactacgtgtattggtaccagcagttccccggcacagctcctaagctgctgatctatcggagctaccagagaccaagcggggtccccgacaggttttctggcagtaaatcagggagctccgccagcctggctatttccggcctgcagtctgaggacgaagcagattactattgcgccacctgggacgattccctggatggatgggtcttcggcggcggcacaaaactgaccgtcctgaggcagccaaaggcggcgcccagtgtcacactgtttccccctagctccgaggaactgcaggctaacaaagcaacactggtgtgtctgatcagcgacttctaccctggagctgtgactgtcgcctggaaggctgattctagtccagtgaaagcaggcgtcgagaccacaactccctctaagcagagtaacaacaagtacgcagcctcaagctatctgtcactgaccccagaacagtggaagagccaccggagctattcctgccaggtcactcacgaaggctccactgtcgagaaaaccgtcgctcccaccgaatgttca

SEQ ID NO: 276 - protein, 219 aa, Artificial Sequence
  Clone No. 14413
DIVMTQAAFSNPVTLGTSASISCRSNKSLLHSDGITYLFWYLQRPGQSPQLLIYRMSNLASGVPDRFSGSGSGTDFTLRISRVEAEDVGVYYCAQMVEFPRTFGGGTKLEIKRTVAAPSVFIFPPSDEQLKSGTASVVCLLNNFYPREAKVQWKVDNALQSGNSQESVTEQDSKDSTYSLSSTLTLSKADYEKHKVYACEVTHQGLSSPVTKSFNRGEC

SEQ ID NO: 277 - DNA, 657 bp, Artificial Sequence
  Clone No. 14413
gacatcgtgatgacacaggccgcctttagcaaccccgtgaccctgggcacaagcgcctccatctcttgccggagcaataagtccctgctgcactccgatggcatcacctacctgttctggtatctgcagaggcccggccagtctcctcagctgctgatctaccgcatgtctaacctggccagcggagtgcctgaccggttcagcggctccggctctggaaccgacttcaccctgcggatctccagagtggaggccgaggacgtgggcgtgtactattgtgcccagatggtggagttcccaagaacctttggcggcggcacaaagctggagatcaagaggacagtggcggcgcccagtgtcttcatttttccccctagcgacgaacagctgaagtctgggacagccagtgtggtctgtctgctgaacaacttctaccctagagaggctaaagtgcagtggaaggtcgataacgcactgcagtccggaaattctcaggagagtgtgactgaacaggactcaaaagatagcacctattccctgtcaagcacactgactctgagcaaggccgactacgagaagcataaagtgtatgcttgtgaagtcacccaccaggggctgagttcaccagtcacaaaatcattcaacagaggggagtgc

SEQ ID NO: 278 - protein, 454 aa, Artificial Sequence
  Clone No. 8656
QVQLVQSGAEVKKPGASVRVSCRASGYIFTESGITWVRQAPGQGLEWMGWISGYSGDTKYAQKLQGRVTMTKDTSTTTAYMELRSLRYDDTAVYYCARDVQYSGSYLGAYYFDYWSPGTLVTVSSASTKGPSVFPLAPSSKSTSGGTAALGCLVKDYFPEPVTVSWNSGALTSGVHTFPAVLQSSGLYSLSSVVTVPSSSLGTQTYICNVNHKPSNTKVDKKVEPKSCDKTHTCPPCPAPELLGGPSVFLFPPKPKDTLMISRTPEVTCVVVDVSHEDPEVKFNWYVDGVEVHNAKTKPREEQYNSTYRVVSVLTVLHQDWLNGKEYKCKVSNKALPAPIEKTISKAKGQPREPQVYVYPPSRDELTKNQVSLTCLVKGFYPSDIAVEWESNGQPENNYKTTPPVLDSDGSFALVSKLTVDKSRWQQGNVFSCSVMHEALHNHYTQKSLSLSPG

SEQ ID NO: 279 - DNA, 1362 bp, Artificial Sequence
  Clone No. 8656
caggtgcagctggtccagtccggggctgaagtgaaaaaacctggggcatccgtgcgggtgtcatgtcgggcaagcgggtatatctttactgagtctggaatcacctgggtgaggcaggctcccggacagggactggaatggatgggatggatttctggatacagtggcgacacaaagtatgcacagaaactgcagggccgcgtcaccatgacaaaggatacttcaaccacaactgcctacatggagctgcggagcctgagatatgacgatacagccgtgtactattgcgcccgggacgtgcagtacagcgggtcctacctgggggcatactacttcgattactggtcacctggaactctggtcaccgtctcttcagctagcaccaagggcccttctgtgtttccactggcaccctcaagcaaaagcacctccggaggaacagcagcactgggatgtctggtcaaggactatttccccgagcctgtgaccgtctcatggaatagcggcgcactgactagtggggtgcacacctttcccgccgtcctgcagtcctctgggctgtacagcctgagttcagtggtcacagtgccaagctcctctctgggaactcagacctatatctgcaacgtcaatcataaacccagcaacacaaaggtcgacaagaaagtggagcccaagagctgtgataaaactcatacctgcccaccttgtccggcgccagaactgctgggaggaccaagcgtgttcctgtttccacccaagcctaaagacaccctgatgatttcccggactcctgaggtcacctgcgtggtcgtggacgtgtctcacgaggaccccgaagtcaagttcaactggtacgtggatggcgtcgaagtgcataatgccaagaccaaaccccgggaggaacagtacaactctacctatagagtcgtgagtgtcctgacagtgctgcaccaggactggctgaatgggaaggagtataagtgtaaagtgagcaacaaagccctgcccgccccaatcgaaaaaacaatctctaaagcaaaaggacagcctcgcgaaccacaggtctacgtctaccccccatcaagagatgaactgacaaaaaatcaggtctctctgacatgcctggtcaaaggattctacccttccgacatcgccgtggagtgggaaagtaacggccagcccgagaacaattacaagaccacaccccctgtcctggactctgatgggagtttcgctctggtgtcaaagctgaccgtcgataaaagccggtggcagcagggcaatgtgtttagctgctccgtcatgcacgaagccctgcacaatcactacacacagaagtccctgagcctgagccctggc

SEQ ID NO: 280 - protein, 214 aa, Artificial Sequence; identical to SEQ ID NO: 226
  Clone No. 4561

SEQ ID NO: 281 - DNA, 642 bp, Artificial Sequence
  Clone No. 4561
gatattcagatgacccagtcccctagctccctgtccgcttctgtgggcgacagggtcactatcacctgccgcgcatctcaggatgtgaacaccgcagtcgcctggtaccagcagaagcctgggaaagctccaaagctgctgatctacagtgcatcattcctgtattcaggagtgcccagccggtttagcggcagcagatctggcaccgacttcacactgactatctctagtctgcagcctgaggattttgccacatactattgccagcagcactataccacaccccctactttcggccaggggaccaaagtggagatcaagcgaactgtggccgctccaagtgtcttcatttttccacccagcgacgaacagctgaaatccggcacagcttctgtggtctgtctgctgaacaacttctaccccagagaggccaaagtgcagtggaaggtcgataacgctctgcagagtggcaacagccaggagagcgtgacagaacaggactccaaagattctacttatagtctgtcaagcaccctgacactgagcaaggcagactacgaaaagcataaagtgtatgcctgtgaggtgacccatcaggggctgtcttctcccgtgaccaagtctttcaaccgaggcgaatgt

SEQ ID NO: 282 - protein, 454 aa, Artificial Sequence
  Clone No. 8659
QVQLVQSGAEVKKPGASVRVSCRASGYIFTESGITWVRQAPGQGLEWMGWISGYSGDTKYAQKLQGRVTMTKDTSTTTAYMELRSLRYDDTAVYYCARDVQYSGSYLGAYYFDYWSPGTLVTVSSASTKGPSVFPLAPSSKSTSGGTAALGCLVKDYFPEPVTVSWNSGALTSGVHTFPAVLQSSGLYSLSSVVTVPSSSLGTQTYICNVNHKPSNTKVDKKVEPKSCDKTHTCPPCPAPELLGGPSVFLFPPKPKDTLMISRTPEVTCVVVDVSHEDPEVKFNWYVDGVEVHNAKTKPREEQYNSTYRVVSVLTVLHQDWLNGKEYKCKVSNKALPAPIEKTISKAKGQPREPQVYVLPPSRDELTKNQVSLLCLVKGFYPSDIAVEWESNGQPENNYLTWPPVLDSDGSFFLYSKLTVDKSRWQQGNVFSCSVMHEALHNHYTQKSLSLSPG

SEQ ID NO: 283 - DNA, 1362 bp, Artificial Sequence
  Clone No. 8659
caggtgcagctggtccagtccggggctgaagtgaaaaaacctggggcatccgtgcgggtgtcatgtcgggcaagcgggtatatctttactgagtctggaatcacctgggtgaggcaggctcccggacagggactggaatggatgggatggatttctggatacagtggcgacacaaagtatgcacagaaactgcagggccgcgtcaccatgacaaaggatacttcaaccacaactgcctacatggagctgcggagcctgagatatgacgatacagccgtgtactattgcgcccgggacgtgcagtacagcgggtcctacctgggggcatactacttcgattactggtcacctggaactctggtcaccgtctcttcagctagcaccaagggcccttctgtgtttccactggcaccctcaagcaaaagcacctccggaggaacagcagcactgggatgtctggtcaaggactatttccccgagcctgtgaccgtctcatggaatagcggcgcactgactagtggggtgcacacctttcccgccgtcctgcagtcctctgggctgtacagcctgagttcagtggtcacagtgccaagctcctctctgggaactcagacctatatctgcaacgtcaatcataaacccagcaacacaaaggtcgacaagaaagtggagcccaagagctgtgataaaactcatacctgcccaccttgtccggcgccagaactgctgggaggaccaagcgtgttcctgtttccacccaagcctaaagacaccctgatgatttcccggactcctgaggtcacctgcgtggtcgtggacgtgtctcacgaggaccccgaagtcaagttcaactggtacgtggatggcgtcgaagtgcataatgccaagaccaaaccccgggaggaacagtacaactctacctatagagtcgtgagtgtcctgacagtgctgcaccaggactggctgaatgggaaggagtataagtgtaaagtgagcaacaaagccctgcccgccccaatcgaaaaaacaatctctaaagcaaaaggacagcctcgcgaaccacaggtctacgtgctgccccctagccgcgacgaactgactaaaaatcaggtctctctgctgtgtctggtcaaaggattctacccttccgacatcgccgtggagtgggaaagtaacggccagcccgagaacaattacctgacctggccccctgtgctggactctgatgggagtttctttctgtattcaaagctgacagtcgataaaagccggtggcagcagggcaatgtgttcagctgctccgtcatgcacgaagcactgcacaaccattacactcagaagtccctgtccctgtcacctggc

SEQ ID NO: 284 - protein, 689 aa, Artificial Sequence
  Clone No. 16855
EVQLVQSGAEVKKPGESLRISCKGSGYSFSTYWISWVRQMPGKGLEWMGKIYPGDSYTNYSPSFQGQVTISADKSISTAYLQWSSLKASDTAMYYCARGYGIFDYWGQGTLVTVSSASTKGPSVFPLAPSSKSTSGGTAALGCLVKDYFPEPVTVSWNSGALTSGVHTFPAVLQSSGLYSLSSVVTVPSSSLGTQTYICNVNHKPSNTKVDKKVEPKSCDKTHTCPPCPAPEAAGGPSVFLFPPKPKDTLMISRTPEVTCVVVSVSHEDPEVKFNWYVDGVEVHNAKTKPREEQYNSTYRVVSVLTVLHQDWLNGKEYKCKVSNKALPAPIEKTISKAKGQPREPQVYVYPPSRDELTKNQVSLTCLVKGFYPSDIAVEWESNGQPENNYKTTPPVLDSDGSFALVSKLTVDKSRWQQGNVFSCSVMHEALHNHYTQKSLSLSPGGGGGQVQLVQSGAEVKKPGASVKVSCKASGYSFTGYTMNWVRQAPGQGLEWMGLITPYNGASSYNQKFRGKATMTVDTSTSTVYMELSSLRSEDTAVYYCARGGYDGRGFDYWGQGTLVTVSSGGGGSGGGGSGGGGSDIQMTQSPSSLSASVGDRVTITCSASSSVSYMHWYQQKSGKAPKLLIYDTSKLASGVPSRFSGSGSGTDFTLTISSLQPEDFATYYCQQWSKHPLTFGQGTKLEIK

SEQ ID NO: 285 - DNA, 2067 bp, Artificial Sequence
  Clone No. 16855
gaggtgcagctggtgcagagcggagcagaggtgaagaagccaggcgagtccctgaggatctcttgcaagggcagcggctacagcttctccacctattggatctcctgggtgcgccagatgcctggcaagggactggagtggatgggcaagatctaccccggcgacagctacacaaactattctcctagctttcagggccaggtgaccatctccgccgataagtccatctctacagcctatctgcagtggagctccctgaaggccagcgacaccgccatgtactattgcgccagaggctacggcatcttcgattattggggccagggcaccctggtgacagtgtctagcgctagcacaaagggcccaagcgtgtttcctctggccccatcctctaagagcacctccggaggaacagccgccctgggctgtctggtgaaggactacttccctgagccagtgaccgtgtcctggaactctggggccctgaccagcggagtgcacacatttcccgccgtgctgcagagctccggactgtactccctgtctagcgtggtgaccgtgccttcctctagcctgggcacccagacatatatctgcaacgtgaatcacaagccttctaatacaaaggtcgacaagaaggtggagccaaagagctgtgataagacccacacatgcccaccttgtccggcgccagaggccgccggaggaccaagcgtgttcctgtttccacccaagcccaaggacaccctgatgatctccaggacccctgaggtgacatgcgtggtggtgtctgtgagccacgaggacccagaggtgaagttcaactggtacgtggatggcgtggaggtgcacaatgccaagacaaagcccagagaggagcagtacaattccacctatcgcgtggtgtctgtgctgacagtgctgcaccaggattggctgaacggcaaggagtataagtgcaaggtgtccaataaggccctgccagcccccatcgagaagaccatctctaaggccaagggccagcctcgcgaacctcaggtgtacgtgtatcctccaagcagagacgagctgaccaagaaccaggtgtccctgacatgtctggtgaagggcttttacccctctgatatcgccgtggagtgggagagcaatggccagcctgagaacaattataagaccacaccccctgtgctggacagcgatggctccttcgccctggtgagcaagctgaccgtggacaagtccaggtggcagcagggcaacgtgttttcctgctctgtgatgcacgaggccctgcacaatcactacacacagaagagcctgagcttaagcccaggaggaggaggaggacaggtgcagctggtgcagagcggagccgaggtgaagaagcctggggccagcgtgaaggtgtcttgcaaggcctctggctacagcttcacaggctataccatgaactgggtgcggcaggcccccggacagggactggagtggatgggcctgatcacaccttacaacggggccagctcctataatcagaagtttaggggcaaggccaccatgacagtggacacctccacatctaccgtgtacatggagctgtctagcctgcgctccgaggataccgccgtgtactattgcgccagaggcggatacgacggcagaggcttcgattattggggccagggcacactggtgaccgtgtcctctggaggaggaggcagcggcggaggaggctccggcggcggcggctctgacatccagatgacacagtctccaagctccctgagcgcctccgtgggcgatcgggtgacaatcacctgtagcgcctctagctccgtgtcctacatgcactggtatcagcagaagtccggcaaggccccaaagctgctgatctatgacaccagcaagctggcctccggagtgccatctaggttctctggcagcggctccggcacagactttacactgaccatctctagcctgcagcctgaggatttcgccacctactattgtcagcagtggagcaagcacccactgacatttggccagggcaccaagctggagatcaag

SEQ ID NO: 286 - protein, 690 aa, Artificial Sequence
  Clone No. 16861
EVQLVQSGAEVKKPGESLRISCKGSGYSFSTYWISWVRQMPGKGLEWMGKIYPGDSYTNYSPSFQGQVTISADKSISTAYLQWSSLKASDTAMYYCARGYGIFDYWGQGTLVTVSSASTKGPSVFPLAPSSKSTSGGTAALGCLVKDYFPEPVTVSWNSGALTSGVHTFPAVLQSSGLYSLSSVVTVPSSSLGTQTYICNVNHKPSNTKVDKKVEPKSCDKTHTCPPCPAPEAAGGPSVFLFPPKPKDTLMISRTPEVTCVVVSVSHEDPEVKFNWYVDGVEVHNAKTKPREEQYNSTYRVVSVLTVLHQDWLNGKEYKCKVSNKALPAPIEKTISKAKGQPREPQVYVYPPSRDELTKNQVSLTCLVKGFYPSDIAVEWESNGQPENNYKTTPPVLDSDGSFALVSKLTVDKSRWQQGNVFSCSVMHEALHNHYTQKSLSLSPGGGGGQVQLVQSGAEVVKPGASVKMSCKASGYTFTGYNIHWVKQAPGQGLEWIGAIYPGNGDTSYKQKFRGRATLTADTSTSTVYMELSSLRSEDSAVYYCARGETARATFAYWGQGTLVTVSSGGGGSGGGGSGGGGSDIQMTQSPSSLSASVGDRVTITCSASQDIGNFLNWYQQKPGKTVKVLIYYTSSLYSGVPSRFSGSGSGTDYTLTISSLQPEDFATYYCQQYSKLPLTFGQGTKLELK

SEQ ID NO: 287 - DNA, 2070 bp, Artificial Sequence
  Clone No. 16861
gaggtgcagctggtgcagagcggagcagaggtgaagaagccaggcgagtccctgaggatctcttgcaagggcagcggctacagcttctccacctattggatctcctgggtgcgccagatgcctggcaagggactggagtggatgggcaagatctaccccggcgacagctacacaaactattctcctagctttcagggccaggtgaccatctccgccgataagtccatctctacagcctatctgcagtggagctccctgaaggccagcgacaccgccatgtactattgcgccagaggctacggcatcttcgattattggggccagggcaccctggtgacagtgtctagcgctagcacaaagggcccaagcgtgtttcctctggccccatcctctaagagcacctccggaggaacagccgccctgggctgtctggtgaaggactacttccctgagccagtgaccgtgtcctggaactctggggccctgaccagcggagtgcacacatttcccgccgtgctgcagagctccggactgtactccctgtctagcgtggtgaccgtgccttcctctagcctgggcacccagacatatatctgcaacgtgaatcacaagccttctaatacaaaggtcgacaagaaggtggagccaaagagctgtgataagacccacacatgcccaccttgtccggcgccagaggccgccggaggaccaagcgtgttcctgtttccacccaagcccaaggacaccctgatgatctccaggacccctgaggtgacatgcgtggtggtgtctgtgagccacgaggacccagaggtgaagttcaactggtacgtggatggcgtggaggtgcacaatgccaagacaaagcccagagaggagcagtacaattccacctatcgcgtggtgtctgtgctgacagtgctgcaccaggattggctgaacggcaaggagtataagtgcaaggtgtccaataaggccctgccagcccccatcgagaagaccatctctaaggccaagggccagcctcgcgaacctcaggtgtacgtgtatcctccaagcagagacgagctgaccaagaaccaggtgtccctgacatgtctggtgaagggcttttacccctctgatatcgccgtggagtgggagagcaatggccagcctgagaacaattataagaccacaccccctgtgctggacagcgatggctccttcgccctggtgagcaagctgaccgtggacaagtccaggtggcagcagggcaacgtgttttcctgctctgtgatgcacgaggccctgcacaatcactacacacagaagagcctgagcttaagccctggaggaggaggaggacaggtgcagctggtgcagtctggagccgaggtggtgaagccaggggccagcgtgaagatgtcctgcaaggcctctggctacaccttcacaggctataacatccactgggtgaagcaggcccccggacagggactggagtggatcggagccatctaccctggcaatggcgacacaagctataagcagaagtttcggggcagagccaccctgacagccgatacctccacatctaccgtgtacatggagctgagctccctgcggtccgaggactctgccgtgtactattgcgccaggggcgagacagcaagggccaccttcgcctattggggacagggcacactggtgaccgtgtctagcggcggcggcggctctggaggaggaggcagcggcggaggaggctccgatatccagatgacccagtccccatcctctctgagcgcctccgtgggcgaccgggtgacaatcacctgttctgccagccaggatatcggcaacttcctgaattggtaccagcagaagcccggcaagacagtgaaggtgctgatctactataccagctccctgtacagcggcgtgccttccaggttttccggctctggcagcggcacagactatacactgaccatctctagcctgcagccagaggatttcgccacctactattgtcagcagtacagcaagctgcccctgacatttggccagggcaccaagctggagctgaag

SEQ ID NO: 288 - protein, 696 aa, Artificial Sequence
  Clone No. 16863
EVQLVQSGAEVKKPGESLRISCKGSGYSFSTYWISWVRQMPGKGLEWMGKIYPGDSYTNYSPSFQGQVTISADKSISTAYLQWSSLKASDTAMYYCARGYGIFDYWGQGTLVTVSSASTKGPSVFPLAPSSKSTSGGTAALGCLVKDYFPEPVTVSWNSGALTSGVHTFPAVLQSSGLYSLSSVVTVPSSSLGTQTYICNVNHKPSNTKVDKKVEPKSCDKTHTCPPCPAPEAAGGPSVFLFPPKPKDTLMISRTPEVTCVVVSVSHEDPEVKFNWYVDGVEVHNAKTKPREEQYNSTYRVVSVLTVLHQDWLNGKEYKCKVSNKALPAPIEKTISKAKGQPREPQVYVYPPSRDELTKNQVSLTCLVKGFYPSDIAVEWESNGQPENNYKTTPPVLDSDGSFALVSKLTVDKSRWQQGNVFSCSVMHEALHNHYTQKSLSLSPGGGGGEVQLVESGGGLVQPGGSLRLSCAASGFSFSDFAMSWVRQAPGKGLEWVATIGRVAFHTYYPDSMKGRFTISRDNSKNTLYLQMNSLRAEDTAVYYCARHRGFDVGHFDFWGQGTLVTVSSGGGGSGGGGSGGGGSDIQMTQSPSSLSASVGDRVTITCRSSETLVHSSGNTYLEWYQQKPGKAPKLLIYRVSNRFSGVPSRFSGSGSGTDFTLTISSLQPEDFATYYCFQGSFNPLTFGQGTKVEIK

SEQ ID NO: 289 - DNA, 2088 bp, Artificial Sequence
  Clone No. 16863
gaggtgcagctggtgcagagcggagcagaggtgaagaagccaggcgagtccctgaggatctcttgcaagggcagcggctacagcttctccacctattggatctcctgggtgcgccagatgcctggcaagggactggagtggatgggcaagatctaccccggcgacagctacacaaactattctcctagctttcagggccaggtgaccatctccgccgataagtccatctctacagcctatctgcagtggagctccctgaaggccagcgacaccgccatgtactattgcgccagaggctacggcatcttcgattattggggccagggcaccctggtgacagtgtctagcgctagcacaaagggcccaagcgtgtttcctctggccccatcctctaagagcacctccggaggaacagccgccctgggctgtctggtgaaggactacttccctgagccagtgaccgtgtcctggaactctggggccctgaccagcggagtgcacacatttcccgccgtgctgcagagctccggactgtactccctgtctagcgtggtgaccgtgccttcctctagcctgggcacccagacatatatctgcaacgtgaatcacaagccttctaatacaaaggtcgacaagaaggtggagccaaagagctgtgataagacccacacatgcccaccttgtccggcgccagaggccgccggaggaccaagcgtgttcctgtttccacccaagcccaaggacaccctgatgatctccaggacccctgaggtgacatgcgtggtggtgtctgtgagccacgaggacccagaggtgaagttcaactggtacgtggatggcgtggaggtgcacaatgccaagacaaagcccagagaggagcagtacaattccacctatcgcgtggtgtctgtgctgacagtgctgcaccaggattggctgaacggcaaggagtataagtgcaaggtgtccaataaggccctgccagcccccatcgagaagaccatctctaaggccaagggccagcctcgcgaacctcaggtgtacgtgtatcctccaagcagagacgagctgaccaagaaccaggtgtccctgacatgtctggtgaagggcttttacccctctgatatcgccgtggagtgggagagcaatggccagcctgagaacaattataagaccacaccccctgtgctggacagcgatggctccttcgccctggtgagcaagctgaccgtggacaagtccaggtggcagcagggcaacgtgttttcctgctctgtgatgcacgaggccctgcacaatcactacacacagaagagcctgagcttaagccctggaggaggaggaggagaggtgcagctggtggagagcggcggcggcctggtgcagccaggaggctctctgaggctgagctgcgcagcctccggcttctccttttctgacttcgccatgtcctgggtgcggcaggcccccggcaagggactggagtgggtggccaccatcggcagagtggccttccacacatactatcctgactccatgaagggccggtttaccatctctagagataacagcaagaatacactgtacctgcagatgaactctctgcgcgccgaggataccgccgtgtactattgcgcaaggcacagaggctttgacgtgggacacttcgatttttggggccagggcaccctggtgacagtgagcagcggaggaggaggctccggcggcggaggctctggaggaggaggcagcgacatccagatgacccagagcccatctagcctgagcgcctccgtgggcgatagggtgaccatcacatgtcgctcctctgagaccctggtgcacagctccggcaacacatacctggagtggtatcagcagaagcccggcaaggcccctaagctgctgatctatagggtgtccaatcgcttctctggagtgccaagccggttttctggcagcggctccggaaccgacttcaccctgacaatctctagcctgcagccagaggattttgccacatactattgtttccagggctcctttaatcccctgaccttcggccagggcacaaaggtggagatcaag

SEQ ID NO: 290 - protein, 696 aa, Artificial Sequence
  Clone No. 18512
QVQLQESGPGLVQPTQSLSITCTVSGFSLISYGVHWVRQSPGKGLEWLGVIWSGGSTDYNAAFISRLSISKDNSKSQVFFKMNSLQADDTAIYYCARNPLTATVMDYWGQGTSVTVSSASTKGPSVFPLAPSSKSTSGGTAALGCLVKDYFPEPVTVSWNSGALTSGVHTFPAVLQSSGLYSLSSVVTVPSSSLGTQTYICNVNHKPSNTKVDKKVEPKSCDKTHTCPPCPAPEAAGGPSVFLFPPKPKDTLMISRTPEVTCVVVSVSHEDPEVKFNWYVDGVEVHNAKTKPREEQYNSTYRVVSVLTVLHQDWLNGKEYKCKVSNKALPAPIEKTISKAKGQPREPQVYVYPPSRDELTKNQVSLTCLVKGFYPSDIAVEWESNGQPENNYKTTPPVLDSDGSFALVSKLTVDKSRWQQGNVFSCSVMHEALHNHYTQKSLSLSPGGGGGQEQLVESGGGLVQPEGSLTLTCTASKFSFSSLYYMCWVRQAPGKGLEWIACVYGGSSGNTYYASWAKGRFTISKASSTTVTLQLTSLTAADTATYFCARFDVDGSGFNLWGPGTLVTVSSGGGGSGGGGSGGGGSDIVMTQTPSSVSAAVGGTVTIKCQASQTIGSSLAWYQQKPGQPPKLLIYRASTLASGVSSRFRGSGSGTEYTLTISDLECADAATYYCQWTDYGYIYIWAFGGGTEVVVK

SEQ ID NO: 291 - DNA, 2088 bp, Artificial Sequence
  Clone No. 18512
caggtgcagctgcaggagagcggaccaggactggtgcagcctacacagtctctgagcatcacctgcacagtgtctggcttcagcctgatctcctacggagtgcactgggtgaggcagtcccctggcaagggactggagtggctgggcgtgatctggtctggcggcagcaccgactataacgccgcctttatctcccgcctgtccatctctaaggataacagcaagtcccaggtgttctttaagatgaacagcctgcaggccgacgatacagccatctactattgtgcccggaatcccctgaccgccacagtgatggactactggggccagggcacctctgtgacagtgagctccgctagcacaaagggcccctccgtgtttcctctggccccatcctctaagtccacctctggaggaacagccgccctgggctgtctggtgaaggattacttccctgagccagtgaccgtgtcctggaactctggggccctgaccagcggagtgcacacatttcccgccgtgctgcagagctccggactgtactccctgtctagcgtggtgaccgtgccttcctctagcctgggcacccagacatatatctgcaacgtgaatcacaagccttccaatacaaaggtcgacaagaaggtggagccaaagtcttgtgataagacccacacatgcccaccttgtccggcgccagaggccgccggaggaccaagcgtgttcctgtttccacccaagcccaaggacaccctgatgatctcccggaccccagaggtgacatgcgtggtggtgagcgtgtcccacgaggaccccgaggtgaagtttaactggtacgtggatggcgtggaggtgcacaatgccaagacaaagccccgggaggagcagtacaattctacctatagagtggtgagcgtgctgacagtgctgcaccaggattggctgaacggcaaggagtataagtgtaaggtgagcaataaggccctgccagcccccatcgagaagaccatctccaaggccaagggccagcctcgcgagccccaggtgtacgtgtatccccctagcagagacgagctgacaaagaaccaggtgtccctgacctgcctggtgaagggcttctatccctctgatatcgccgtggagtgggagagcaatggccagcctgagaacaattacaagaccacaccacccgtgctggacagcgatggctccttcgccctggtgagcaagctgacagtggacaagtccaggtggcagcagggcaacgtgttttcttgtagcgtgatgcacgaggccctgcacaatcactatacccagaagtccctgtctctgagcccaggaggaggaggaggacaggagcagctggtggagtctggcggcggcctggtgcagccagagggctccctgaccctgacatgcaccgcctctaagttcagctttagctccctgtactatatgtgctgggtgaggcaggcccccggcaagggactggagtggatcgcctgcgtgtatggcggctctagcggcaacacctactatgcctcctgggccaagggccgcttcacaatctctaaggcctcctctaccacagtgaccctgcagctgacaagcctgaccgccgccgacacagccacctacttctgtgcccggtttgacgtggatggctccggctttaatctgtggggccctggcacactggtgaccgtgagctccggaggaggaggcagcggaggaggaggctccggcggcggcggctctgatatcgtgatgacacagaccccatctagcgtgagcgccgccgtgggaggcacagtgaccatcaagtgccaggcctcccagaccatcggctcctctctggcctggtatcagcagaagcctggccagcctccaaagctgctgatctacagagcctccacactggcctctggcgtgagctcccggttcagaggctccggctctggaaccgagtacacactgaccatcagcgacctggagtgcgcagatgcagcaacatactattgtcagtggaccgattacggctatatctacatctgggcctttggcggaggaaccgaggtggtggtgaag

SEQ ID NO: 292 - protein, 698 aa, Artificial Sequence
  Clone No. 16866
EVQLVQSGAEVKKPGESLRISCKGSGYSFSTYWISWVRQMPGKGLEWMGKIYPGDSYTNYSPSFQGQVTISADKSISTAYLQWSSLKASDTAMYYCARGYGIFDYWGQGTLVTVSSASTKGPSVFPLAPSSKSTSGGTAALGCLVKDYFPEPVTVSWNSGALTSGVHTFPAVLQSSGLYSLSSVVTVPSSSLGTQTYICNVNHKPSNTKVDKKVEPKSCDKTHTCPPCPAPEAAGGPSVFLFPPKPKDTLMISRTPEVTCVVVSVSHEDPEVKFNWYVDGVEVHNAKTKPREEQYNSTYRVVSVLTVLHQDWLNGKEYKCKVSNKALPAPIEKTISKAKGQPREPQVYVYPPSRDELTKNQVSLTCLVKGFYPSDIAVEWESNGQPENNYKTTPPVLDSDGSFALVSKLTVDKSRWQQGNVFSCSVMHEALHNHYTQKSLSLSPGGGGGQVELVQSGAEVKKPGESLKISCKGSGYSFTSYWIGWVRQAPGKGLEWMGIIDPGDSRTRYSPSFQGQVTISADKSISTAYLQWSSLKASDTAMYYCARGQLYGGTYMDGWGQGTLVTVSSVEGGSGGSGGSGGSGGVDDIALTQPASVSGSPGQSITISCTGTSSDIGGYNSVSWYQQHPGKAPKLMIYGVNNRPSGVSNRFSGSKSGNTASLTISGLQAEDEADYYCSSYDIESATPVFGGGTKLTVL

SEQ ID NO: 293 - DNA, 2094 bp, Artificial Sequence
  Clone No. 16866
gaggtgcagctggtgcagagcggagcagaggtgaagaagccaggcgagtccctgaggatctcttgcaagggcagcggctacagcttctccacctattggatctcctgggtgcgccagatgcctggcaagggactggagtggatgggcaagatctaccccggcgacagctacacaaactattctcctagctttcagggccaggtgaccatctccgccgataagtccatctctacagcctatctgcagtggagctccctgaaggccagcgacaccgccatgtactattgcgccagaggctacggcatcttcgattattggggccagggcaccctggtgacagtgtctagcgctagcacaaagggcccaagcgtgtttcctctggccccatcctctaagagcacctccggaggaacagccgccctgggctgtctggtgaaggactacttccctgagccagtgaccgtgtcctggaactctggggccctgaccagcggagtgcacacatttcccgccgtgctgcagagctccggactgtactccctgtctagcgtggtgaccgtgccttcctctagcctgggcacccagacatatatctgcaacgtgaatcacaagccttctaatacaaaggtcgacaagaaggtggagccaaagagctgtgataagacccacacatgcccaccttgtccggcgccagaggccgccggaggaccaagcgtgttcctgtttccacccaagcccaaggacaccctgatgatctccaggacccctgaggtgacatgcgtggtggtgtctgtgagccacgaggacccagaggtgaagttcaactggtacgtggatggcgtggaggtgcacaatgccaagacaaagcccagagaggagcagtacaattccacctatcgcgtggtgtctgtgctgacagtgctgcaccaggattggctgaacggcaaggagtataagtgcaaggtgtccaataaggccctgccagcccccatcgagaagaccatctctaaggccaagggccagcctcgcgaacctcaggtgtacgtgtatcctccaagcagagacgagctgaccaagaaccaggtgtccctgacatgtctggtgaagggcttttacccctctgatatcgccgtggagtgggagagcaatggccagcctgagaacaattataagaccacaccccctgtgctggacagcgatggctccttcgccctggtgagcaagctgaccgtggacaagtccaggtggcagcagggcaacgtgttttcctgctctgtgatgcacgaggccctgcacaatcactacacacagaagagcctgagcttaagcccaggaggaggaggaggacaggtggagctggtgcagtccggagccgaggtgaagaagcctggcgagtctctgaagatcagctgcaagggctctggctacagcttcacctcctattggatcggatgggtgcggcaggcccctggcaagggactggagtggatgggcatcatcgaccctggcgattctcggacaagatactctccaagctttcagggccaggtgaccatcagcgccgacaagtccatctctacagcctatctgcagtggagctccctgaaggccagcgataccgccatgtactattgcgccaggggccagctgtacggaggaacatatatggacggatggggacagggcaccctggtgacagtgtctagcgtggagggaggctctggaggcagcggaggctccggaggctctggaggagtggacgatatcgccctgacccagccagccagcgtgtccggctctccaggccagtccatcacaatctcttgtaccggcacatcctctgatatcggcggctacaacagcgtgtcctggtatcagcagcaccccggcaaggcccctaagctgatgatctacggcgtgaacaataggccaagcggcgtgtccaaccgcttctctggcagcaagtccggcaataccgccagcctgacaatctccggactgcaggcagaggacgaggcagattactattgtagctcctatgacatcgagtccgccacccccgtgtttggaggaggcaccaagctgacagtgctg

SEQ ID NO: 294 - protein, 698 aa, Artificial Sequence
  Clone No. 16870
EVQLVQSGAEVKKPGESLRISCKGSGYSFSTYWISWVRQMPGKGLEWMGKIYPGDSYTNYSPSFQGQVTISADKSISTAYLQWSSLKASDTAMYYCARGYGIFDYWGQGTLVTVSSASTKGPSVFPLAPSSKSTSGGTAALGCLVKDYFPEPVTVSWNSGALTSGVHTFPAVLQSSGLYSLSSVVTVPSSSLGTQTYICNVNHKPSNTKVDKKVEPKSCDKTHTCPPCPAPEAAGGPSVFLFPPKPKDTLMISRTPEVTCVVVSVSHEDPEVKFNWYVDGVEVHNAKTKPREEQYNSTYRVVSVLTVLHQDWLNGKEYKCKVSNKALPAPIEKTISKAKGQPREPQVYVLPPSRDELTKNQVSLLCLVKGFYPSDIAVEWESNGQPENNYLTWPPVLDSDGSFFLYSKLTVDKSRWQQGNVFSCSVMHEALHNHYTQKSLSLSPGGGGGQVELVQSGAEVKKPGESLKISCKGSGYSFTSYWIGWVRQAPGKGLEWMGIIDPGDSRTRYSPSFQGQVTISADKSISTAYLQWSSLKASDTAMYYCARGQLYGGTYMDGWGQGTLVTVSSVEGGSGGSGGSGGSGGVDDIALTQPASVSGSPGQSITISCTGTSSDIGGYNSVSWYQQHPGKAPKLMIYGVNNRPSGVSNRFSGSKSGNTASLTISGLQAEDEADYYCSSYDIESATPVFGGGTKLTVL

SEQ ID NO: 295 - DNA, 2094 bp, Artificial Sequence
  Clone No. 16870
gaggtgcagctggtgcagagcggagcagaggtgaagaagccaggcgagtccctgaggatctcttgcaagggcagcggctacagcttctccacctattggatctcctgggtgcgccagatgcctggcaagggactggagtggatgggcaagatctaccccggcgacagctacacaaactattctcctagctttcagggccaggtgaccatctccgccgataagtccatctctacagcctatctgcagtggagctccctgaaggccagcgacaccgccatgtactattgcgccagaggctacggcatcttcgattattggggccagggcaccctggtgacagtgtctagcgctagcacaaagggcccaagcgtgtttcctctggccccatcctctaagagcacctccggaggaacagccgccctgggctgtctggtgaaggactacttccctgagccagtgaccgtgtcctggaactctggggccctgaccagcggagtgcacacatttcccgccgtgctgcagagctccggactgtactccctgtctagcgtggtgaccgtgccttcctctagcctgggcacccagacatatatctgcaacgtgaatcacaagccttctaatacaaaggtcgacaagaaggtggagccaaagagctgtgataagacccacacatgcccaccttgtccggcgccagaggccgccggaggaccaagcgtgttcctgtttccacccaagcccaaggacaccctgatgatctccaggacccctgaggtgacatgcgtggtggtgtctgtgagccacgaggacccagaggtgaagttcaactggtacgtggatggcgtggaggtgcacaatgccaagacaaagcccagagaggagcagtacaattccacctatcgcgtggtgtctgtgctgacagtgctgcaccaggattggctgaacggcaaggagtataagtgcaaggtgtccaataaggccctgccagcccccatcgagaagaccatctctaaggccaagggccagcctcgcgaacctcaggtgtacgtgctgcccccttccagggacgagctgaccaagaaccaggtgtctctgctgtgcctggtgaagggcttctatccttctgatatcgccgtggagtgggagagcaatggccagccagagaacaattacctgacctggccacccgtgctggactccgatggctctttctttctgtatagcaagctgacagtggacaagtccagatggcagcagggcaacgtgttttcttgcagcgtgatgcacgaggccctgcacaatcactacacacagaagtccctgagcttaagcccaggaggaggaggaggacaggtggagctggtgcagagcggagccgaggtgaagaagcctggcgagagcctgaagatctcctgtaagggcagcggctactccttcacctcttattggatcggatgggtgcggcaggcccccggcaagggcctggagtggatgggcatcatcgacccaggcgatagccggacaagatactccccctcttttcagggccaggtgaccatctccgccgacaagagcatctccacagcctatctgcagtggagctccctgaaggcctccgataccgccatgtactattgcgccagaggccagctgtacggcggcacatatatggacggatggggacagggcaccctggtgacagtgtctagcgtggagggaggcagcggaggctccggaggctctggaggcagcggaggagtggacgatatcgccctgacccagcccgcctctgtgagcggctcccctggccagtctatcacaatcagctgtaccggcacatcctctgatatcggcggctacaactctgtgagctggtatcagcagcaccctggcaaggccccaaagctgatgatctacggcgtgaacaataggccatccggcgtgtctaaccgcttctccggctctaagagcggcaataccgcctccctgacaatctctggactgcaggcagaggacgaggcagattactattgtagctcctatgatatcgagagcgccacccccgtgtttggaggaggcaccaagctgacagtgctg

SEQ ID NO: 296 - protein, 477 aa, Artificial Sequence
  Clone No. 11761
QVQLVQSGAEVVKPGASVKISCKASGYTFTGYFMNWVKQSPGQSLEWIGRIHPYDGDTFYNQKFQGKATLTVDKSSNTAHMELLSLTSEDFAVYYCTRYDGSRAMDYWGQGTTVTVSSGGGGSGGGGSGGGGSDIVLTQSPLSLAVSLGQPAIISCKASQSVSFAGTSLMHWYHQKPGQQPRLLIYRASNLEAGVPDRFSGSGSKTDFTLTISPVEAEDAATYYCQQSREYPYTFGGGTKLEIKAAEPKSSDKTHTCPPCPAPELLGGPSVFLFPPKPKDTLMISRTPEVTCVVVDVSHEDPEVKFNWYVDGVEVHNAKTKPREEQYNSTYRVVSVLTVLHQDWLNGKEYKCKVSNKALPAPIEKTISKAKGQPREPQVYVLPPSRDELTKNQVSLLCLVKGFYPSDIAVEWESNGQPENNYLTWPPVLDSDGSFFLYSKLTVDKSRWQQGNVFSCSVMHEALHNHYTQKSLSLSPG

SEQ ID NO: 297 - DNA, 1431 bp, Artificial Sequence
  Clone No. 11761
caggtgcagctggtgcagagcggagccgaggtggtgaagccaggggccagcgtgaagatcagctgcaaggcctccggctacaccttcacaggctacttcatgaactgggtgaagcagtctcctggccagagcctggagtggatcggcagaatccacccatacgacggcgataccttctataaccagaagtttcagggcaaggccaccctgacagtggacaagagctccaataccgcccacatggagctgctgtccctgacatctgaggatttcgccgtgtactattgcacccggtacgacggctccagagccatggattattggggccagggcaccacagtgacagtgtctagcggaggaggaggctccggaggaggaggctctggcggcggcggcagcgacatcgtgctgacccagagcccactgtccctggccgtgtccctgggccagcccgccatcatctcttgtaaggcctcccagagcgtgagcttcgccgggaccagcctgatgcactggtaccaccagaagcccggccagcagcccagactgctgatctatagggcctccaatctggaggccggagtgccagaccggttctccggctctggcagcaagaccgacttcaccctgacaatcagccctgtggaggcagaggatgcagcaacatactattgtcagcagtccagggagtacccatatacctttggcggcggcacaaagctggagatcaaggcggccgagcctaaaagtagcgataaaacccatacctgccccccctgcccggcgccagaactgctgggaggaccaagcgtgttcctgtttccacccaagcctaaagacaccctgatgatttcccggactcctgaggtcacctgcgtggtcgtggacgtgtctcacgaggaccccgaagtcaagttcaactggtacgtggatggcgtcgaagtgcataatgccaagaccaaaccccgggaggaacagtacaactctacctatagagtcgtgagtgtcctgacagtgctgcaccaggactggctgaatgggaaggagtataagtgtaaagtgagcaacaaagccctgcccgccccaatcgaaaaaacaatctctaaagcaaaaggacagcctcgcgaaccacaggtctacgtgctgccccctagccgcgacgaactgactaaaaatcaggtctctctgctgtgtctggtcaaaggattctacccttccgacatcgccgtggagtgggaaagtaacggccagcccgagaacaattacctgacctggccccctgtgctggactctgatgggagtttctttctgtattcaaagctgacagtcgataaaagccggtggcagcagggcaatgtgttcagctgctccgtcatgcacgaagcactgcacaaccattacactcagaagtccctgtccctgtcacctggc

SEQ ID NO: 298 - protein, 118 aa, Artificial Sequence
  8K22 VH
QEQLVESGGGLVQPEGSLTLTCKASGFTISNNYYMCWVRQAPGKGLEWIACIYGGISGRTYYASWAKGRFTISKTSSTTVTLQMTSLTAADTATYFCVRGYVGTSNLWGPGTLVTVSS

SEQ ID NO: 299 - protein, 113 aa, Artificial Sequence
  8K22 VL
DIVMTQTPASVEAAVGGTVTIKCQASQSIYSSLAWYQQKPGQSPKLLIYDASHLASGVPSRFSGSRYGTEFTLTISGVQCDDAATYYCQGGWYSSAATYVPNTFGGGTEVVVK

SEQ ID NO: 300 - protein, 120 aa, Artificial Sequence
  1H06 VH
QEQLVESGGGLVQPEGSLTLTCTASKFSFSSLYYMCWVRQAPGKGLEWIACVYGGSSGNTYYASWAKGRFTISKASSTTVTLQLTSLTAADTATYFCARFDVDGSGFNLWGPGTLVTVSS

SEQ ID NO: 301 - protein, 110 aa, Artificial Sequence
  1H06 VL
DIVMTQTPSSVSAAVGGTVTIKCQASQTIGSSLAWYQQKPGQPPKLLIYRASTLASGVSSRFRGSGSGTEYTLTISDLECADAATYYCQWTDYGYIYIWAFGGGTEVVVK

SEQ ID NO: 302 - protein, 119 aa, Artificial Sequence [sequence omitted]

SEQ ID NO: 303 - protein, 107 aa, Artificial Sequence [sequence omitted]

SEQ ID NO: 304 - protein, 119 aa, Artificial Sequence
  Farletuzumab VH
EVQLVESGGGVVQPGRSLRLSCSASGFTFSGYGLSWVRQAPGKGLEWVAMISSGGSYTYYADSVKGRFAISRDNAKNTLFLQMDSLRPEDTGVYFCARHGDDPAWFAYWGQGTPVTVSS

SEQ ID NO: 305 - protein, 110 aa, Artificial Sequence
  Farletuzumab VL
DIQLTQSPSSLSASVGDRVTITCSVSSSISSNNLHWYQQKPGKAPKPWIYGTSNLASGVPSRFSGSGSGTDYTFTISSLQPEDIATYYCQQWSSYPYMYTFGQGTKVEIK

SEQ ID NO: 306 - protein, 119 aa, Artificial Sequence
  VH rabbit 8K22 CDRs ported onto framework of germline IGHV3-66*01 (H0)
EVQLVESGGGLVQPGGSLRLSCAASGFTISNNYYMCWVRQAPGKGLEWVSCIYGGISGRTYYADSVKGRFTISRDNSKNTLYLQMNSLRAEDTAVYYCARGYVGTSNLWGQGTLVTVSS

SEQ ID NO: 307 - protein, 119 aa, Artificial Sequence
  Humanized 8K22 VH H1
EVQLVESGGGLVQPGGSLRLSCAASGFTISNNYYMCWVRQAPGKGLEWVSCIYGGISGRTYYADSVKGRFTISKDNSKNTLYLQMNSLRAEDTAVYYCVRGYVGTSNLWGQGTLVTVSS

SEQ ID NO: 308 - protein, 119 aa, Artificial Sequence
  Humanized 8K22 VH H2
EVQLVESGGGLVQPGGSLRLSCAASGFTISNNYYMCWVRQAPGKGLEWIACIYGGISGRTYYADSAKGRFTISKDNSKNTVYLQMNSLRAEDTAVYYCVRGYVGTSNLWGQGTLVTVSS

SEQ ID NO: 309 - protein, 119 aa, Artificial Sequence
  Humanized 8K22 VH H3
EVQLVESGGGLVQPGGSLRLSCAASGFTISNNYYMCWVRQAPGKGLEWIACIYGGISGRTYYADSAKGRFTISKDSSKNTVYLQMNSLRAEDTAVYYCVRGYVGTSNLWGQGTLVTVSS

SEQ ID NO: 310 - protein, 118 aa, Artificial Sequence
  Humanized 8K22 VH H4
EVQLVESGGGLVQPGGSLRLSCAASGFTISNNYYMCWVRQAPGKGLEWIACIYGGISGRTYYADSAKGRFTISKDSSNTVYLQMNSLRAEDTAVYYCVRGYVGTSNLWGQGTLVTVSS

SEQ ID NO: 311 - protein, 119 aa, Artificial Sequence
  Humanized 8K22 VH H5
EVQLVESGGGLVQPGGSLRLSCAASGFTISNNYYMCWVRQAPGKGLEWIACIYGGISGRTYYADWAKGRFTISKDSSKNTVYLQMNSLRAEDTAVYYCVRGYVGTSNLWGQGTLVTVSS

SEQ ID NO: 312 - protein, 113 aa, Artificial Sequence
  VL rabbit 8K22 CDRs ported onto framework of germline IGKV1-39*01 (L0)
DIQMTQSPSSLSASVGDRVTITCQASQSIYSSLAWYQQKPGKAPKLLIYDASHLASGVPSRFSGSGSGTDFTLTISSLQPEDFATYYCQGGWYSSAATYVPNTFGGGTKLEIK

SEQ ID NO: 313 - protein, 113 aa, Artificial Sequence
  Humanized 8K22 VL L1
DIQMTQSPSSLSASVGDRVTITCQASQSIYSSLAWYQQKPGKAPKLLIYDASHLASGVPSRFSGSGSGTDFTLTISSVQPEDFATYYCQGGWYSSAATYVPNTFGGGTKVEIK

SEQ ID NO: 314 - protein, 113 aa, Artificial Sequence
  Humanized 8K22 VL L2
DIQMTQSPSSLSASVGDRVTITCQASQSIYSSLAWYQQKPGKAPKLLIYDASHLASGVPSRFSGSGSGTDFTLTISSVQPEDFATYYCQGGWYSSAATYVPNTFGGGTKVEVK

SEQ ID NO: 315 - protein, 113 aa, Artificial Sequence
  Humanized 8K22 VL L3
DIQMTQSPSSLSASVGDRVTITCQASQSIYSSLAWYQQKPGKAPKLLIYDASHLASGVPSRFSGSRYGTDFTLTISSVQPEDFATYYCQGGWYSSAATYVPNTFGGGTKVEVK

SEQ ID NO: 316 - protein, 113 aa, Artificial Sequence
  Humanized 8K22 VL L4
DIQMTQSPSSLSASVGDRVTITCQASQSIYSSLAWYQQKPGKAPKLLIYDASHLASGVPSRFSGSGSGTDFTLTISSVQPEDAATYYCQGGWYSSAATYVPNTFGGGTKVEVK

SEQ ID NO: 317 - protein, 113 aa, Artificial Sequence
  Humanized 8K22 VL L5
DIQMTQSPSSLSASVGDRVTITCQASQSIYSSLAWYQQKPGKAPKLLIYDASHLASGVPSRFSGSRYGTDFTLTISSVQPEDAATYYCQGGWYSSAATYVPNTFGGGTKVEVK

SEQ ID NO: 318 - protein, 329 aa, Artificial Sequence
  IgG1 CH1-hinge-CH2-CH3 (Domain boundaries); D1 - P10, CH2; A11 - K120, CH3; G121 - G226), includes L234A, L235A, D265S substitutions
ASTKGPSVFPLAPSSKSTSGGTAALGCLVKDYFPEPVTVSWNSGALTSGVHTFPAVLQSSGLYSLSSVVTVPSSSLGTQTYICNVNHKPSNTKVDKKVEPKSCDKTHTCPPCPAPELLGGPSVFLFPPKPKDTLMISRTPEVTCVVVDVSHEDPEVKFNWYVDGVEVHNAKTKPREEQYNSTYRVVSVLTVLHQDWLNGKEYKCKVSNKALPAPIEKTISKAKGQPREPQVYTLPPSRDELTKNQVSLTCLVKGFYPSDIAVEWESNGQPENNYKTTPPVLDSDGSFFLYSKLTVDKSRWQQGNVFSCSVMHEALHNHYTQKSLSLSPG

SEQ ID NO: 319 - protein, 216 aa, Artificial Sequence
  IgG1 Fc sequence 231-446 (EU-numbering), without hinge, includes L234A, L235A, D265S substitutions
APELLGGPSVFLFPPKPKDTLMISRTPEVTCVVVDVSHEDPEVKFNWYVDGVEVHNAKTKPREEQYNSTYRVVSVLTVLHQDWLNGKEYKCKVSNKALPAPIEKTISKAKGQPREPQVYTLPPSRDELTKNQVSLTCLVKGFYPSDIAVEWESNGQPENNYKTTPPVLDSDGSFFLYSKLTVDKSRWQQGNVFSCSVMHEALHNHYTQKSLSLSPG

SEQ ID NO: 320 - protein, 15 aa, Artificial Sequence
  (G4S)3 Linker
GGGGSGGGGSGGGGS

SEQ ID NO: 321 - protein, 20 aa, Artificial Sequence
  (G4S)4 Linker
GGGGSGGGGSGGGGSGGGGS

SEQ ID NO: 322 - protein, 120 aa, Artificial Sequence [sequence omitted]

SEQ ID NO: 323 - protein, 107 aa, Artificial Sequence [sequence omitted]

SEQ ID NO: 324 - protein, 119 aa, Artificial Sequence
  MSLN scFv having SEQ ID NO:74 (RG7787) (VH)
QVQLVQSGAEVKKPGASVKVSCKASGYSFTGYTMNWVRQAPGQGLEWMGLITPYNGASSYNQKFRGKATMTVDTSTSTVYMELSSLRSEDTAVYYCARGGYDGRGFDYWGQGTLVTVSS

SEQ ID NO: 325 - protein, 106 aa, Artificial Sequence
  MSLN scFv having SEQ ID NO:74 (RG7787) (VL)
DIQMTQSPSSLSASVGDRVTITCSASSSVSYMHWYQQKSGKAPKLLIYDTSKLASGVPSRFSGSGSGTDFTLTISSLQPEDFATYYCQQWSKHPLTFGQGTKLEIK

SEQ ID NO: 326 - protein, 120 aa, Artificial Sequence
  MSLN scFv having SEQ ID NO:75 (anetumab) (VH)
QVELVQSGAEVKKPGESLKISCKGSGYSFTSYWIGWVRQAPGKGLEWMGIIDPGDSRTRYSPSFQGQVTISADKSISTAYLQWSSLKASDTAMYYCARGQLYGGTYMDGWGQGTLVTVSS

SEQ ID NO: 327 - protein, 111 aa, Artificial Sequence
  MSLN scFv having SEQ ID NO:75 (anetumab) (VL)
DIALTQPASVSGSPGQSITISCTGTSSDIGGYNSVSWYQQHPGKAPKLMIYGVNNRPSGVSNRFSGSKSGNTASLTISGLQAEDEADYYCSSYDIESATPVFGGGTKLTVL

SEQ ID NO: 328 - protein, 120 aa, Artificial Sequence
  NaPi2b scFv having SEQ ID NO:76 (lifastuzumab) (VH)
EVQLVESGGGLVQPGGSLRLSCAASGFSFSDFAMSWVRQAPGKGLEWVATIGRVAFHTYYPDSMKGRFTISRDNSKNTLYLQMNSLRAEDTAVYYCARHRGFDVGHFDFWGQGTLVTVSS

SEQ ID NO: 329 - protein, 112 aa, Artificial Sequence
  NaPi2b scFv having SEQ ID NO:76 (lifastuzumab) (VL)
DIQMTQSPSSLSASVGDRVTITCRSSETLVHSSGNTYLEWYQQKPGKAPKLLIYRVSNRFSGVPSRFSGSGSGTDFTLTISSLQPEDFATYYCFQGSFNPLTFGQGTKVEIK

SEQ ID NO: 330 - protein, 119 aa, Artificial Sequence
  NaPi2b scFv having SEQ ID NO:77 (MX-35)(VH)
QVQLVQSGAEVVKPGASVKMSCKASGYTFTGYNIHWVKQAPGQGLEWIGAIYPGNGDTSYKQKFRGRATLTADTSTSTVYMELSSLRSEDSAVYYCARGETARATFAYWGQGTLVTVSS

SEQ ID NO: 331 - protein, 107 aa, Artificial Sequence
  NaPi2b scFv having SEQ ID NO:77 (MX-35)(VL)
DIQMTQSPSSLSASVGDRVTITCSASQDIGNFLNWYQQKPGKTVKVLIYYTSSLYSGVPSRFSGSGSGTDYTLTISSLQPEDFATYYCQQYSKLPLTFGQGTKLELK

SEQ ID NO: 332 - protein, 118 aa, Artificial Sequence
  FRa scFv having SEQ ID NO:78 (mirvetuximab)(VH)
QVQLVQSGAEVVKPGASVKISCKASGYTFTGYFMNWVKQSPGQSLEWIGRIHPYDGDTFYNQKFQGKATLTVDKSSNTAHMELLSLTSEDFAVYYCTRYDGSRAMDYWGQGTTVTVSS

SEQ ID NO: 333 - protein, 111 aa, Artificial Sequence
  FRa scFv having SEQ ID NO:78 (mirvetuximab)(VL)
DIVLTQSPLSLAVSLGQPAIISCKASQSVSFAGTSLMHWYHQKPGQQPRLLIYRASNLEAGVPDRFSGSGSKTDFTLTISPVEAEDAATYYCQQSREYPYTFGGGTKLEIK

SEQ ID NO: 334 - protein, 246 aa, Artificial Sequence
  8K22 scFv seq of v29676, v29678
DIQMTQSPSSLSASVGDRVTITCQASQSIYSSLAWYQQKPGKAPKLLIYDASHLASGVPSRFSGSRYGTDFTLTISSVQPEDFATYYCQGGWYSSAATYVPNTFGGGTKVEVKGGGGSGGGGSGGGGSEVQLVESGGGLVQPGGSLRLSCAASGFTISNNYYMCWVRQAPGKGLEWIACIYGGISGRTYYADSAKGRFTISKDSSNTVYLQMNSLRAEDTAVYYCVRGYVGTSNLWGQGTLVTVSS

SEQ ID NO: 335 - protein, 251 aa, Artificial Sequence
  8K22 scFv seq of v29677, v29680
DIQMTQSPSSLSASVGDRVTITCQASQSIYSSLAWYQQKPGKAPKLLIYDASHLASGVPSRFSGSRYGTDFTLTISSVQPEDFATYYCQGGWYSSAATYVPNTFGGGTKVEVKGGSGGGSGGGSGGGSGGGSGEVQLVESGGGLVQPGGSLRLSCAASGFTISNNYYMCWVRQAPGKGLEWIACIYGGISGRTYYADSAKGRFTISKDSSNTVYLQMNSLRAEDTAVYYCVRGYVGTSNLWGQGTLVTVSS

SEQ ID NO: 336 - protein, 4 aa, Artificial Sequence
  Linker
GGGG

SEQ ID NO: 337 - protein, 246 aa, Artificial Sequence
  8K22 scFv seq of v29679
EVQLVESGGGLVQPGGSLRLSCAASGFTISNNYYMCWVRQAPGKGLEWIACIYGGISGRTYYADSAKGRFTISKDSSNTVYLQMNSLRAEDTAVYYCVRGYVGTSNLWGQGTLVTVSSGGGGSGGGGSGGGGSDIQMTQSPSSLSASVGDRVTITCQASQSIYSSLAWYQQKPGKAPKLLIYDASHLASGVPSRFSGSRYGTDFTLTISSVQPEDFATYYCQGGWYSSAATYVPNTFGGGTKVEVK

SEQ ID NO: 338 - skipped

SEQ ID NO: 339 - protein, 251 aa, Artificial Sequence
  8K22 scFv seq of v29681
EVQLVESGGGLVQPGGSLRLSCAASGFTISNNYYMCWVRQAPGKGLEWIACIYGGISGRTYYADSAKGRFTISKDSSNTVYLQMNSLRAEDTAVYYCVRGYVGTSNLWGQGTLVTVSSGGSGGGSGGGSGGGSGGGSGDIQMTQSPSSLSASVGDRVTITCQASQSIYSSLAWYQQKPGKAPKLLIYDASHLASGVPSRFSGSRYGTDFTLTISSVQPEDFATYYCQGGWYSSAATYVPNTFGGGTKVEVK

SEQ ID NO: 340 - protein, 246 aa, Artificial Sequence
  8K22 scFv seq of v29682
DIQMTQSPSSLSASVGDRVTITCQASQSIYSSLAWYQQKPGKAPKLLIYDASHLASGVPSRFSGSRYGTDFTLTISSVQPEDFATYYCQGGWYSSAATYVPNTFGCGTKVEVKGGGGSGGGGSGGGGSEVQLVESGGGLVQPGGSLRLSCAASGFTISNNYYMCWVRQAPGKCLEWIACIYGGISGRTYYADSAKGRFTISKDSSNTVYLQMNSLRAEDTAVYYCVRGYVGTSNLWGQGTLVTVSS

SEQ ID NO: 341 - protein, 246 aa, Artificial Sequence
  8K22 scFv seq of v29683
EVQLVESGGGLVQPGGSLRLSCAASGFTISNNYYMCWVRQAPGKCLEWIACIYGGISGRTYYADSAKGRFTISKDSSNTVYLQMNSLRAEDTAVYYCVRGYVGTSNLWGQGTLVTVSSGGGGSGGGGSGGGGSDIQMTQSPSSLSASVGDRVTITCQASQSIYSSLAWYQQKPGKAPKLLIYDASHLASGVPSRFSGSRYGTDFTLTISSVQPEDFATYYCQGGWYSSAATYVPNTFGCGTKVEVK

SEQ ID NO: 342 - protein, 251 aa, Artificial Sequence
  8K22 scFv seq of v29684
DIQMTQSPSSLSASVGDRVTITCQASQSIYSSLAWYQQKPGKAPKLLIYDASHLASGVPSRFSGSRYGTDFTLTISSVQPEDFATYYCQGGWYSSAATYVPNTFGCGTKVEVKGGSGGGSGGGSGGGSGGGSGEVQLVESGGGLVQPGGSLRLSCAASGFTISNNYYMCWVRQAPGKCLEWIACIYGGISGRTYYADSAKGRFTISKDSSNTVYLQMNSLRAEDTAVYYCVRGYVGTSNLWGQGTLVTVSS

SEQ ID NO: 343 - protein, 251 aa, Artificial Sequence
  8K22 scFv seq of v29685
EVQLVESGGGLVQPGGSLRLSCAASGFTISNNYYMCWVRQAPGKCLEWIACIYGGISGRTYYADSAKGRFTISKDSSNTVYLQMNSLRAEDTAVYYCVRGYVGTSNLWGQGTLVTVSSGGSGGGSGGGSGGGSGGGSGDIQMTQSPSSLSASVGDRVTITCQASQSIYSSLAWYQQKPGKAPKLLIYDASHLASGVPSRFSGSRYGTDFTLTISSVQPEDFATYYCQGGWYSSAATYVPNTFGCGTKVEVK

SEQ ID NO: 344 - protein, 231 aa, Artificial Sequence
  Clone No. 12153
EPKSSDKTHTCPPCPAPEAAGGPSVFLFPPKPKDTLMISRTPEVTCVVVSVSHEDPEVKFNWYVDGVEVHNAKTKPREEQYNSTYRVVSVLTVLHQDWLNGKEYKCKVSNKALPAPIEKTISKAKGQPREPQVYVLPPSRDELTKNQVSLLCLVKGFYPSDIAVEWESNGQPENNYLTWPPVLDSDGSFFLYSKLTVDKSRWQQGNVFSCSVMHEALHNHYTQKSLSLSPG

SEQ ID NO: 345 - protein, 214 aa, Artificial Sequence; identical to SEQ ID NO: 228
  Clone No. 20891

SEQ ID NO: 346 - protein, 214 aa, Artificial Sequence; identical to SEQ ID NO: 242
  Clone No. 20898

SEQ ID NO: 347 - protein, 226 aa, Artificial Sequence
  Clone No. 21663
EVQLVESGGGLVQPGGSLRLSCAASGFTISNNYYMCWVRQAPGKGLEWIACIYGGISGRTYYADSAKGRFTISKDSSNTVYLQMNSLRAEDTAVYYCVRGYVGTSNLWGQGTLVTVSSASTKGPSVFPLAPSSKSTSGGTAALGCLVKDYFPEPVTVSWNSGALTSGVHTFPAVLQSSGLYSLSSVVTVPSSSLGTQTYICNVNHKPSNTKVDKKVEPKSCDKTHT

SEQ ID NO: 348 - protein, 446 aa, Artificial Sequence
  Clone No. 21708
EVQLVESGGGLIQPGGSLRISCAVSGFSLTTYAISWVRQAPGKGLEWLGIIWPGGGTNYADSLKGRLTISKDNSKNTVYLQMNSLRTEDTAVYYCARGAGTWYFDVWGQGTLVTVSSASTKGPSVFPLAPSSKSTSGGTAALGCLVKDYFPEPVTVSWNSGALTSGVHTFPAVLQSSGLYSLSSVVTVPSSSLGTQTYICNVNHKPSNTKVDKKVEPKSCDKTHTCPPCPAPEAAGGPSVFLFPPKPKDTLMISRTPEVTCVVVSVSHEDPEVKFNWYVDGVEVHNAKTKPREEQYNSTYRVVSVLTVLHQDWLNGKEYKCKVSNKALPAPIEKTISKAKGQPREPQVYVLPPSRDELTKNQVSLLCLVKGFYPSDIAVEWESNGQPENNYLTWPPVLDSDGSFFLYSKLTVDKSRWQQGNVFSCSVMHEALHNHYTQKSLSLSPG

SEQ ID NO: 349 - protein, 443 aa, Artificial Sequence
  Clone No. 21709
EVQLVESGGGLVQPGGSLRLSCAASGFTFSEFGMHWVRQAPGKGLEWVSYISSGGSTIYYADSVKGRFTISRDNAKNSLYLQMNSLRAEDTAVYYCARDWVDYWGQGTLVTVSSASTKGPSVFPLAPSSKSTSGGTAALGCLVKDYFPEPVTVSWNSGALTSGVHTFPAVLQSSGLYSLSSVVTVPSSSLGTQTYICNVNHKPSNTKVDKKVEPKSCDKTHTCPPCPAPEAAGGPSVFLFPPKPKDTLMISRTPEVTCVVVSVSHEDPEVKFNWYVDGVEVHNAKTKPREEQYNSTYRVVSVLTVLHQDWLNGKEYKCKVSNKALPAPIEKTISKAKGQPREPQVYVLPPSRDELTKNQVSLLCLVKGFYPSDIAVEWESNGQPENNYLTWPPVLDSDGSFFLYSKLTVDKSRWQQGNVFSCSVMHEALHNHYTQKSLSLSPG

SEQ ID NO: 350 - protein, 477 aa, Artificial Sequence
  Clone No. 21828
DIVMTQTPASVEAAVGGTVTIKCQASQSIYSSLAWYQQKPGQSPKLLIYDASHLASGVPSRFSGSRYGTEFTLTISGVQSDDAATYYCQGGWYSSAATYVPNTFGGGTEVVVKGGGGSGGGGSGGGGSQEQLVESGGGLVQPEGSLTLTCKASGFTISNNYYMCWVRQAPGKGLEWIACIYGGISGRTYYASWAKGRFTISKTSSTTVTLQMTSLTAADTATYFCVRGYVGTSNLWGPGTLVTVSSEPKSSDKTHTCPPCPAPEAAGGPSVFLFPPKPKDTLMISRTPEVTCVVVSVSHEDPEVKFNWYVDGVEVHNAKTKPREEQYNSTYRVVSVLTVLHQDWLNGKEYKCKVSNKALPAPIEKTISKAKGQPREPQVYVYPPSRDELTKNQVSLTCLVKGFYPSDIAVEWESNGQPENNYKTTPPVLDSDGSFALVSKLTVDKSRWQQGNVFSCSVMHEALHNHYTQKSLSLSPG

SEQ ID NO: 351 - protein, 443 aa, Artificial Sequence
  Clone No. 22043
EVQLVESGGGLVQPGGSLRLSCAASGFTFSEFGMHWVRQAPGKGLEWVSYISSGGSTIYYADSVKGRFTISRDNAKNSLYLQMNSLRAEDTAVYYCARDWVDYWGQGTLVTVSSASTKGPSVFPLAPSSKSTSGGTAALGCLVKDYFPEPVTVSWNSGALTSGVHTFPAVLQSSGLYSLSSVVTVPSSSLGTQTYICNVNHKPSNTKVDKKVEPKSCDKTHTCPPCPAPEAAGGPSVFLFPPKPKDTLMISRTPEVTCVVVSVSHEDPEVKFNWYVDGVEVHNAKTKPREEQYNSTYRVVSVLTVLHQDWLNGKEYKCKVSNKALPAPIEKTISKAKGQPREPQVYVYPPSRDELTKNQVSLTCLVKGFYPSDIAVEWESNGQPENNYKTTPPVLDSDGSFALVSKLTVDKSRWQQGNVFSCSVMHEALHNHYTQKSLSLSPG

SEQ ID NO: 352 - protein, 698 aa, Artificial Sequence
  Clone No. 22775
DIQMTQSPSSLSASVGDRVTITCQASQSIYSSLAWYQQKPGKAPKLLIYDASHLASGVPSRFSGSRYGTDFTLTISSVQPEDFATYYCQGGWYSSAATYVPNTFGGGTKVEVKGGSGGGSGGGSGGGSGGGSGEVQLVESGGGLVQPGGSLRLSCAASGFTISNNYYMCWVRQAPGKGLEWIACIYGGISGRTYYADSAKGRFTISKDSSNTVYLQMNSLRAEDTAVYYCVRGYVGTSNLWGQGTLVTVSSGGGGEVQLVESGGGLVQPGGSLRLSCAASGFTFSEFGMHWVRQAPGKGLEWVSYISSGGSTIYYADSVKGRFTISRDNAKNSLYLQMNSLRAEDTAVYYCARDWVDYWGQGTLVTVSSASTKGPSVFPLAPSSKSTSGGTAALGCLVKDYFPEPVTVSWNSGALTSGVHTFPAVLQSSGLYSLSSVVTVPSSSLGTQTYICNVNHKPSNTKVDKKVEPKSCDKTHTCPPCPAPEAAGGPSVFLFPPKPKDTLMISRTPEVTCVVVSVSHEDPEVKFNWYVDGVEVHNAKTKPREEQYNSTYRVVSVLTVLHQDWLNGKEYKCKVSNKALPAPIEKTISKAKGQPREPQVYVYPPSRDELTKNQVSLTCLVKGFYPSDIAVEWESNGQPENNYKTTPPVLDSDGSFALVSKLTVDKSRWQQGNVFSCSVMHEALHNHYTQKSLSLSPG

SEQ ID NO: 353 - protein, 698 aa, Artificial Sequence
  Clone No. 22776
EVQLVESGGGLVQPGGSLRLSCAASGFTFSEFGMHWVRQAPGKGLEWVSYISSGGSTIYYADSVKGRFTISRDNAKNSLYLQMNSLRAEDTAVYYCARDWVDYWGQGTLVTVSSASTKGPSVFPLAPSSKSTSGGTAALGCLVKDYFPEPVTVSWNSGALTSGVHTFPAVLQSSGLYSLSSVVTVPSSSLGTQTYICNVNHKPSNTKVDKKVEPKSCDKTHTCPPCPAPEAAGGPSVFLFPPKPKDTLMISRTPEVTCVVVSVSHEDPEVKFNWYVDGVEVHNAKTKPREEQYNSTYRVVSVLTVLHQDWLNGKEYKCKVSNKALPAPIEKTISKAKGQPREPQVYVYPPSRDELTKNQVSLTCLVKGFYPSDIAVEWESNGQPENNYKTTPPVLDSDGSFALVSKLTVDKSRWQQGNVFSCSVMHEALHNHYTQKSLSLSPGGGGGDIQMTQSPSSLSASVGDRVTITCQASQSIYSSLAWYQQKPGKAPKLLIYDASHLASGVPSRFSGSRYGTDFTLTISSVQPEDFATYYCQGGWYSSAATYVPNTFGGGTKVEVKGGSGGGSGGGSGGGSGGGSGEVQLVESGGGLVQPGGSLRLSCAASGFTISNNYYMCWVRQAPGKGLEWIACIYGGISGRTYYADSAKGRFTISKDSSNTVYLQMNSLRAEDTAVYYCVRGYVGTSNLWGQGTLVTVSS

SEQ ID NO: 354 - protein, 698 aa, Artificial Sequence
  Clone No. 22777
EVQLVESGGGLVQPGGSLRLSCAASGFTFSEFGMHWVRQAPGKGLEWVSYISSGGSTIYYADSVKGRFTISRDNAKNSLYLQMNSLRAEDTAVYYCARDWVDYWGQGTLVTVSSASTKGPSVFPLAPSSKSTSGGTAALGCLVKDYFPEPVTVSWNSGALTSGVHTFPAVLQSSGLYSLSSVVTVPSSSLGTQTYICNVNHKPSNTKVDKKVEPKSCDKTHTCPPCPAPEAAGGPSVFLFPPKPKDTLMISRTPEVTCVVVSVSHEDPEVKFNWYVDGVEVHNAKTKPREEQYNSTYRVVSVLTVLHQDWLNGKEYKCKVSNKALPAPIEKTISKAKGQPREPQVYVLPPSRDELTKNQVSLLCLVKGFYPSDIAVEWESNGQPENNYLTWPPVLDSDGSFFLYSKLTVDKSRWQQGNVFSCSVMHEALHNHYTQKSLSLSPGGGGGDIQMTQSPSSLSASVGDRVTITCQASQSIYSSLAWYQQKPGKAPKLLIYDASHLASGVPSRFSGSRYGTDFTLTISSVQPEDFATYYCQGGWYSSAATYVPNTFGGGTKVEVKGGSGGGSGGGSGGGSGGGSGEVQLVESGGGLVQPGGSLRLSCAASGFTISNNYYMCWVRQAPGKGLEWIACIYGGISGRTYYADSAKGRFTISKDSSNTVYLQMNSLRAEDTAVYYCVRGYVGTSNLWGQGTLVTVSS

SEQ ID NO: 355 - protein, 486 aa, Artificial Sequence
  Clone No. 22782
EPKSSDKTHTCPPCPAPEAAGGPSVFLFPPKPKDTLMISRTPEVTCVVVSVSHEDPEVKFNWYVDGVEVHNAKTKPREEQYNSTYRVVSVLTVLHQDWLNGKEYKCKVSNKALPAPIEKTISKAKGQPREPQVYVLPPSRDELTKNQVSLLCLVKGFYPSDIAVEWESNGQPENNYLTWPPVLDSDGSFFLYSKLTVDKSRWQQGNVFSCSVMHEALHNHYTQKSLSLSPGGGGGDIQMTQSPSSLSASVGDRVTITCQASQSIYSSLAWYQQKPGKAPKLLIYDASHLASGVPSRFSGSRYGTDFTLTISSVQPEDFATYYCQGGWYSSAATYVPNTFGGGTKVEVKGGSGGGSGGGSGGGSGGGSGEVQLVESGGGLVQPGGSLRLSCAASGFTISNNYYMCWVRQAPGKGLEWIACIYGGISGRTYYADSAKGRFTISKDSSNTVYLQMNSLRAEDTAVYYCVRGYVGTSNLWGQGTLVTVSS

SEQ ID NO: 356 - protein, 700 aa, Artificial Sequence
  Clone No. 22789
EVQLVESGGGLVQPGGSLRLSCAASGFTFSEFGMHWVRQAPGKGLEWVSYISSGGSTIYYADSVKGRFTISRDNAKNSLYLQMNSLRAEDTAVYYCARDWVDYWGQGTLVTVSSASTKGPSVFPLAPSSKSTSGGTAALGCLVKDYFPEPVTVSWNSGALTSGVHTFPAVLQSSGLYSLSSVVTVPSSSLGTQTYICNVNHKPSNTKVDKKVEPKSCDKTHTCPPCPAPEAAGGPSVFLFPPKPKDTLMISRTPEVTCVVVSVSHEDPEVKFNWYVDGVEVHNAKTKPREEQYNSTYRVVSVLTVLHQDWLNGKEYKCKVSNKALPAPIEKTISKAKGQPREPQVYVYPPSRDELTKNQVSLTCLVKGFYPSDIAVEWESNGQPENNYKTTPPVLDSDGSFALVSKLTVDKSRWQQGNVFSCSVMHEALHNHYTQKSLSLSPGGGGGQVQLVQSGAEVKKPGASVRVSCRASGYIFTESGITWVRQAPGQGLEWMGWISGYSGDTKYAQKLQGRVTMTKDTSTTTAYMELRSLRYDDTAVYYCARDVQYSGSYLGAYYFDYWSPGTLVTVSSGGGGSGGGGSGGGGSGGGQSVLTQPPSASGTPGQRVTISCSGSSSNIGTNYVYWYQQFPGTAPKLLIYRSYQRPSGVPDRFSGSKSGSSASLAISGLQSEDEADYYCATWDDSLDGWVFGGGTKLTVL

SEQ ID NO: 357 - protein, 667 aa, Artificial Sequence
  Clone No. 22791
EVQLVESGGGLVQPGGSLRLSCAASGFTFSEFGMHWVRQAPGKGLEWVSYISSGGSTIYYADSVKGRFTISRDNAKNSLYLQMNSLRAEDTAVYYCARDWVDYWGQGTLVTVSSASTKGPSVFPLAPSSKSTSGGTAALGCLVKDYFPEPVTVSWNSGALTSGVHTFPAVLQSSGLYSLSSVVTVPSSSLGTQTYICNVNHKPSNTKVDKKVEPKSCDKTHTCPPCPAPEAAGGPSVFLFPPKPKDTLMISRTPEVTCVVVSVSHEDPEVKFNWYVDGVEVHNAKTKPREEQYNSTYRVVSVLTVLHQDWLNGKEYKCKVSNKALPAPIEKTISKAKGQPREPQVYVYPPSRDELTKNQVSLTCLVKGFYPSDIAVEWESNGQPENNYKTTPPVLDSDGSFALVSKLTVDKSRWQQGNVFSCSVMHEALHNHYTQKSLSLSPGGGGGDIQMTQSPSSLSASVGDRVTITCQASQSIYSSLAWYQQKPGKAPKLLIYDASHLASGVPSRFSGSRYGTDFTLTISSVQPEDFATYYCQGGWYSSAATYVPNTFGGGTKVEVKRTVAAPSVFIFPPSDEQLKSGTASVVCLLNNFYPREAKVQWKVDNALQSGNSQESVTEQDSKDSTYSLSSTLTLSKADYEKHKVYACEVTHQGLSSPVTKSFNRGEC

SEQ ID NO: 358 - protein, 5 aa, Artificial Sequence
  MOR7480.1 CDR1 Heavy Chain Kabat
TYWIS

SEQ ID NO: 359 - protein, 17 aa, Artificial Sequence
  MOR7480.1 CDR2 Heavy Chain Kabat
KIYPGDSYTNYSPSFQG

SEQ ID NO: 360 - protein, 7 aa, Artificial Sequence
  MOR7480.1 CDR3 Heavy Chain Kabat, Chothia, AbM
GYGIFDY

SEQ ID NO: 361 - protein, 7 aa, Artificial Sequence
  MOR7480.1 CDR1 Heavy Chain Chothia
GYSFSTY

SEQ ID NO: 362 - protein, 6 aa, Artificial Sequence
  MOR7480.1 CDR2 Heavy Chain Chothia
YPGDSY

SEQ ID NO: 363 - protein, 8 aa, Artificial Sequence
  MOR7480.1CDR1 Heavy Chain IMGT
GYSFSTYW

SEQ ID NO: 364 - protein, 8 aa, Artificial Sequence
  MOR7480.1 CDR2 Heavy Chain IMGT
IYPGDSYT

SEQ ID NO: 365 - protein, 9 aa, Artificial Sequence
  MOR7480.1 CDR3 Heavy Chain IMGT
ARGYGIFDY

SEQ ID NO: 366 - protein, 10 aa, Artificial Sequence
  MOR7480.1 CDR1 Heavy Chain AbM
GYSFSTYWIS

SEQ ID NO: 367 - protein, 10 aa, Artificial Sequence
  MOR7480.1 CDR2 Heavy Chain AbM
KIYPGDSYTN

SEQ ID NO: 368 - protein, 11 aa, Artificial Sequence
  MOR7480.1 CDR1 Light Chain Kabat, Chothia, AbM
SGDNIGDQYAH

SEQ ID NO: 369 - protein, 7 aa, Artificial Sequence
  MOR7480.1CDR2 Light Chain Kabat, Chothia, AbM
QDKNRPS

SEQ ID NO: 370 - protein, 11 aa, Artificial Sequence
  MOR7480.1 CDR3 Light Chain Kabat, Chothia, IMGT, AbM
ATYTGFGSLAV

SEQ ID NO: 371 - protein, 6 aa, Artificial Sequence
  MOR7480.1 CDR1 Light Chain IMGT
NIGDQY

SEQ ID NO: 372 - protein, 5 aa, Artificial Sequence
  Mirvetuximab CDR1 Heavy Chain Kabat
GYFMN

SEQ ID NO: 373 - protein, 17 aa, Artificial Sequence
  Mirvetuximab CDR2 Heavy Chain Kabat
RIHPYDGDTFYNQKFQG

SEQ ID NO: 374 - protein, 9 aa, Artificial Sequence
  Mirvetuximab CDR3 Heavy Chain Kabat, Chothia, AbM
YDGSRAMDY

SEQ ID NO: 375 - protein, 7 aa, Artificial Sequence
  Mirvetuximab CDR1 Heavy Chain Chothia
GYTFTGY

SEQ ID NO: 376 - protein, 6 aa, Artificial Sequence
  Mirvetuximab CDR2 Heavy Chain Chothia
HPYDGD

SEQ ID NO: 377 - protein, 8 aa, Artificial Sequence
  Mirvetuximab CDR1 Heavy Chain IMGT
GYTFTGYF

SEQ ID NO: 378 - protein, 8 aa, Artificial Sequence
  Mirvetuximab CDR2 Heavy Chain IMGT
IHPYDGDT

SEQ ID NO: 379 - protein, 11 aa, Artificial Sequence
  Mirvetuximab CDR3 Heavy Chain IMGT
TRYDGSRAMDY

SEQ ID NO: 380 - protein, 10 aa, Artificial Sequence
  Mirvetuximab CDR1 Heavy Chain AbM
GYTFTGYFMN

SEQ ID NO: 381 - protein, 10 aa, Artificial Sequence
  Mirvetuximab CDR2 Heavy Chain AbM
RIHPYDGDTF

SEQ ID NO: 382 - protein, 15 aa, Artificial Sequence
  Mirvetuximab CDR1 Light Chain Kabat, Chothia, AbM
KASQSVSFAGTSLMH

SEQ ID NO: 383 - protein, 7 aa, Artificial Sequence
  Mirvetuximab CDR2 Light Chain Kabat, Chothia, AbM
RASNLEA

SEQ ID NO: 384 - protein, 9 aa, Artificial Sequence
  Mirvetuximab CDR3 Light Chain Kabat, Chothia, IMGT, AbM
QQSREYPYT

SEQ ID NO: 385 - protein, 10 aa, Artificial Sequence
  Mirvetuximab CDR1 Light Chain IMGT
QSVSFAGTSL

SEQ ID NO: 386 - protein, 5 aa, Artificial Sequence
  Farletuzumab CDR1 Heavy Chain Kabat
GYGLS

SEQ ID NO: 387 - protein, 17 aa, Artificial Sequence
  Farletuzumab CDR2 Heavy Chain Kabat
MISSGGSYTYYADSVKG

SEQ ID NO: 388 - protein, 10 aa, Artificial Sequence
  Farletuzumab CDR3 Heavy Chain Kabat, Chothia, AbM
HGDDPAWFAY

SEQ ID NO: 389 - protein, 7 aa, Artificial Sequence
  Farletuzumab CDR1 Heavy Chain Chothia
GFTFSGY

SEQ ID NO: 390 - protein, 6 aa, Artificial Sequence
  Farletuzumab CDR2 Heavy Chain Chothia
SSGGSY

SEQ ID NO: 391 - protein, 8 aa, Artificial Sequence
  Farletuzumab CDR1 Heavy Chain IMGT
GFTFSGYG

SEQ ID NO: 392 - protein, 8 aa, Artificial Sequence
  Farletuzumab CDR2 Heavy Chain IMGT
ISSGGSYT

SEQ ID NO: 393 - protein, 12 aa, Artificial Sequence
  Farletuzumab CDR3 Heavy Chain IMGT
ARHGDDPAWFAY

SEQ ID NO: 394 - protein, 10 aa, Artificial Sequence
  Farletuzumab CDR1 Heavy Chain AbM
GFTFSGYGLS

SEQ ID NO: 395 - protein, 10 aa, Artificial Sequence
  Farletuzumab CDR2 Heavy Chain AbM
MISSGGSYTY

SEQ ID NO: 396 - protein, 12 aa, Artificial Sequence
  Farletuzumab CDR1 Light Chain Kabat, Chothia, AbM
SVSSSISSNNLH

SEQ ID NO: 397 - protein, 7 aa, Artificial Sequence
  Farletuzumab CDR2 Light Chain Kabat, Chothia, AbM
GTSNLAS

SEQ ID NO: 398 - protein, 11 aa, Artificial Sequence
  Farletuzumab CDR3 Light Chain Kabat, Chothia, IMGT, AbM
QQWSSYPYMYT

SEQ ID NO: 399 - protein, 7 aa, Artificial Sequence
  Farletuzumab CDR1 Light Chain IMGT
SSISSNN

SEQ ID NO: 400 - protein, 5 aa, Artificial Sequence
  Lifastuzumab CDR1 Heavy Chain Kabat
DFAMS

SEQ ID NO: 401 - protein, 17 aa, Artificial Sequence
  Lifastuzumab CDR2 Heavy Chain Kabat
TIGRVAFHTYYPDSMKG

SEQ ID NO: 402 - protein, 11 aa, Artificial Sequence
  Lifastuzumab CDR3 Heavy Chain Kabat, Chothia, AbM
HRGFDVGHFDF

SEQ ID NO: 403 - protein, 7 aa, Artificial Sequence
  Lifastuzumab CDR1 Heavy Chain Chothia
GFSFSDF

SEQ ID NO: 404 - protein, 6 aa, Artificial Sequence
  Lifastuzumab CDR2 Heavy Chain Chothia
GRVAFH

SEQ ID NO: 405 - protein, 8 aa, Artificial Sequence
  Lifastuzumab CDR1 Heavy Chain IMGT
GFSFSDFA

SEQ ID NO: 406 - protein, 8 aa, Artificial Sequence
  Lifastuzumab CDR2 Heavy Chain IMGT
IGRVAFHT

SEQ ID NO: 407 - protein, 13 aa, Artificial Sequence
  Lifastuzumab CDR3 Heavy Chain IMGT
ARHRGFDVGHFDF

SEQ ID NO: 408 - protein, 10 aa, Artificial Sequence
  Lifastuzumab CDR1 Heavy Chain AbM
GFSFSDFAMS

SEQ ID NO: 409 - protein, 10 aa, Artificial Sequence
  Lifastuzumab CDR2 Heavy Chain AbM
TIGRVAFHTY

SEQ ID NO: 410 - protein, 16 aa, Artificial Sequence
  Lifastuzumab CDR1 Light Chain Kabat, Chothia, AbM
RSSETLVHSSGNTYLE

SEQ ID NO: 411 - protein, 7 aa, Artificial Sequence
  Lifastuzumab CDR2 Light Chain Kabat, Chothia, AbM
RVSNRFS

SEQ ID NO: 412 - protein, 9 aa, Artificial Sequence
  Lifastuzumab CDR3 Light Chain Kabat, Chothia, IMGT, AbM
FQGSFNPLT

SEQ ID NO: 413 - protein, 5 aa, Artificial Sequence
  MX-35 CDR1 Heavy Chain Kabat
GYNIH

SEQ ID NO: 414 - protein, 17 aa, Artificial Sequence
  MX-35 CDR2 Heavy Chain Kabat
AIYPGNGDTSYKQKFRG

SEQ ID NO: 415 - protein, 10 aa, Artificial Sequence
  MX-35 CDR3 Heavy Chain Kabat, Chothia, AbM
GETARATFAY

SEQ ID NO: 416 - protein, 7 aa, Artificial Sequence
  MX-35 CDR1 Heavy Chain Chothia
GYTFTGY

SEQ ID NO: 417 - protein, 6 aa, Artificial Sequence
  MX-35 CDR2 Heavy Chain Chothia
YPGNGD

SEQ ID NO: 418 - protein, 8 aa, Artificial Sequence
  MX-35 CDR1 Heavy Chain IMGT
GYTFTGYN

SEQ ID NO: 419 - protein, 8 aa, Artificial Sequence
  MX-35 CDR2 Heavy Chain IMGT
IYPGNGDT

SEQ ID NO: 420 - protein, 12 aa, Artificial Sequence
  MX-35 CDR3 Heavy Chain IMGT
ARGETARATFAY

SEQ ID NO: 421 - protein, 10 aa, Artificial Sequence
  MX-35 CDR1 Heavy Chain AbM
GYTFTGYNIH

SEQ ID NO: 422 - protein, 10 aa, Artificial Sequence
  MX-35 CDR2 Heavy Chain AbM
AIYPGNGDTS

SEQ ID NO: 423 - protein, 11 aa, Artificial Sequence
  MX-35 CDR1 Light Chain Kabat, Chothia, AbM
SASQDIGNFLN

SEQ ID NO: 424 - protein, 7 aa, Artificial Sequence
  MX-35 CDR2 Light Chain Kabat, Chothia, AbM
YTSSLYS

SEQ ID NO: 425 - protein, 9 aa, Artificial Sequence
  MX-35 CDR3 Light Chain Kabat, Chothia, IMGT, AbM
QQYSKLPLT

SEQ ID NO: 426 - protein, 5 aa, Artificial Sequence
  Trastuzumab CDR1 Heavy Chain Kabat
DTYIH

SEQ ID NO: 427 - protein, 17 aa, Artificial Sequence
  Trastuzumab CDR2 Heavy Chain Kabat
RIYPTNGYTRYADSVKG

SEQ ID NO: 428 - protein, 11 aa, Artificial Sequence
  Trastuzumab CDR3 Heavy Chain Kabat, Chothia, AbM
WGGDGFYAMDY

SEQ ID NO: 429 - protein, 7 aa, Artificial Sequence
  Trastuzumab CDR1 Heavy Chain Chothia
GFNIKDT

SEQ ID NO: 430 - protein, 6 aa, Artificial Sequence
  Trastuzumab CDR2 Heavy Chain Chothia
YPTNGY

SEQ ID NO: 431 - protein, 8 aa, Artificial Sequence
  Trastuzumab CDR1 Heavy Chain IMGT
GFNIKDTY

SEQ ID NO: 432 - protein, 8 aa, Artificial Sequence
  Trastuzumab CDR2 Heavy Chain IMGT
IYPTNGYT

SEQ ID NO: 433 - protein, 13 aa, Artificial Sequence
  Trastuzumab CDR3 Heavy Chain IMGT
SRWGGDGFYAMDY

SEQ ID NO: 434 - protein, 10 aa, Artificial Sequence
  Trastuzumab CDR1 Heavy Chain AbM
GFNIKDTYIH

SEQ ID NO: 435 - protein, 10 aa, Artificial Sequence
  Trastuzumab CDR2 Heavy Chain AbM
RIYPTNGYTR

SEQ ID NO: 436 - protein, 11 aa, Artificial Sequence
  Trastuzumab CDR1 Light Chain Kabat, Chothia, AbM
RASQDVNTAVA

SEQ ID NO: 437 - protein, 7 aa, Artificial Sequence
  Trastuzumab CDR2 Light Chain Kabat, Chothia, AbM
SASFLYS

SEQ ID NO: 438 - protein, 9 aa, Artificial Sequence
  Trastuzumab CDR3 Light Chain Kabat, Chothia, IMGT, AbM
QQHYTTPPT

SEQ ID NO: 439 - protein, 6 aa, Artificial Sequence
  Trastuzumab CDR1 Light Chain IMGT
QDVNTA

SEQ ID NO: 440 - protein, 5 aa, Artificial Sequence
  Pertuzumab CDR1 Heavy Chain Kabat
DYTMD

SEQ ID NO: 441 - protein, 17 aa, Artificial Sequence
  Pertuzumab CDR2 Heavy Chain Kabat
DVNPNSGGSIYNQRFKG

SEQ ID NO: 442 - protein, 10 aa, Artificial Sequence
  Pertuzumab CDR3 Heavy Chain Kabat, Chothia, AbM
NLGPSFYFDY

SEQ ID NO: 443 - protein, 7 aa, Artificial Sequence
  Pertuzumab CDR1 Heavy Chain Chothia
GFTFTDY

SEQ ID NO: 444 - protein, 6 aa, Artificial Sequence
  Pertuzumab CDR2 Heavy Chain Chothia
NPNSGG

SEQ ID NO: 445 - protein, 8 aa, Artificial Sequence
  Pertuzumab CDR1 Heavy Chain IMGT
GFTFTDYT

SEQ ID NO: 446 - protein, 8 aa, Artificial Sequence
  Pertuzumab CDR2 Heavy Chain IMGT
VNPNSGGS

SEQ ID NO: 447 - protein, 12 aa, Artificial Sequence
  Pertuzumab CDR3 Heavy Chain IMGT
ARNLGPSFYFDY

SEQ ID NO: 448 - protein, 10 aa, Artificial Sequence
  Pertuzumab CDR1 Heavy Chain AbM
GFTFTDYTMD

SEQ ID NO: 449 - protein, 10 aa, Artificial Sequence
  Pertuzumab CDR2 Heavy Chain AbM
DVNPNSGGSI

SEQ ID NO: 450 - protein, 11 aa, Artificial Sequence
  Pertuzumab CDR1 Light Chain Kabat, Chothia, AbM
KASQDVSIGVA

SEQ ID NO: 451 - protein, 7 aa, Artificial Sequence
  Pertuzumab CDR2 Light Chain Kabat, Chothia, AbM
SASYRYT

SEQ ID NO: 452 - protein, 9 aa, Artificial Sequence
  Pertuzumab CDR3 Light Chain Kabat, Chothia, IMGT, AbM
QQYYIYPYT

SEQ ID NO: 453 - protein, 6 aa, Artificial Sequence
  Pertuzumab CDR1 Light Chain IMGT
QDVSIG

SEQ ID NO: 454 - protein, 5 aa, Artificial Sequence
  RG7787 CDR1 Heavy Chain Kabat
GYTMN

SEQ ID NO: 455 - protein, 17 aa, Artificial Sequence
  RG7787 CDR2 Heavy Chain Kabat
LITPYNGASSYNQKFRG

SEQ ID NO: 456 - protein, 10 aa, Artificial Sequence
  RG7787 CDR3 Heavy Chain Kabat, Chothia, AbM
GGYDGRGFDY

SEQ ID NO: 457 - protein, 7 aa, Artificial Sequence
  RG7787 CDR1 Heavy Chain Chothia
GYSFTGY

SEQ ID NO: 458 - protein, 6 aa, Artificial Sequence
  RG7787 CDR2 Heavy Chain Chothia
TPYNGA

SEQ ID NO: 459 - protein, 8 aa, Artificial Sequence
  RG7787 CDR1 Heavy Chain IMGT
GYSFTGYT

SEQ ID NO: 460 - protein, 8 aa, Artificial Sequence
  RG7787 CDR2 Heavy Chain IMGT
ITPYNGAS

SEQ ID NO: 461 - protein, 12 aa, Artificial Sequence
  RG7787 CDR3 Heavy Chain IMGT
ARGGYDGRGFDY

SEQ ID NO: 462 - protein, 10 aa, Artificial Sequence
  RG7787 CDR1 Heavy Chain AbM
GYSFTGYTMN

SEQ ID NO: 463 - protein, 10 aa, Artificial Sequence
  RG7787 CDR2 Heavy Chain AbM
LITPYNGASS

SEQ ID NO: 464 - protein, 10 aa, Artificial Sequence
  RG7787 CDR1 Light Chain Kabat, Chothia, AbM
SASSSVSYMH

SEQ ID NO: 465 - protein, 7 aa, Artificial Sequence
  RG7787 CDR2 Light Chain Kabat, Chothia, AbM
DTSKLAS

SEQ ID NO: 466 - protein, 9 aa, Artificial Sequence
  RG7787 CDR3 Light Chain Kabat, Chothia, IMGT, AbM
QQWSKHPLT

SEQ ID NO: 467 - protein, 5 aa, Artificial Sequence
  RG7787 CDR1 Light Chain IMGT
SSVSY

SEQ ID NO: 468 - protein, 11 aa, Artificial Sequence
  Lifastuzumab CDR1 Light Chain IMGT
ETLVHSSGNTY

SEQ ID NO: 469 - protein, 6 aa, Artificial Sequence
  MX-35 CDR1 Light Chain IMGT
QDIGNF

SEQ ID NO: 470 - protein, 6 aa, Artificial Sequence
  CDR1 heavy chain Kabat
SLYYMC

SEQ ID NO: 471 - protein, 18 aa, Artificial Sequence
  CDR2 heavy chain Kabat
CVYGGSSGNTYYASWAKG

SEQ ID NO: 472 - protein, 10 aa, Artificial Sequence
  CDR3 heavy chain Kabat, Chothia, AbM
FDVDGSGFNL

SEQ ID NO: 473 - protein, 8 aa, Artificial Sequence
  CDR1 heavy chain Chothia
KFSFSSLY

SEQ ID NO: 474 - protein, 7 aa, Artificial Sequence
  CDR2 heavy chain Chothia
YGGSSGN

SEQ ID NO: 475 - protein, 9 aa, Artificial Sequence
  CDR1 heavy chain IMGT
KFSFSSLYY

SEQ ID NO: 476 - protein, 9 aa, Artificial Sequence
  CDR2 heavy chain IMGT
VYGGSSGNT

SEQ ID NO: 477 - protein, 12 aa, Artificial Sequence
  CDR3 heavy chain IMGT
ARFDVDGSGFNL

SEQ ID NO: 478 - protein, 11 aa, Artificial Sequence
  CDR1 heavy chain AbM
KFSFSSLYYMC

SEQ ID NO: 479 - protein, 11 aa, Artificial Sequence
  CDR2 heavy chain AbM
CVYGGSSGNTY

SEQ ID NO: 480 - protein, 7 aa, Artificial Sequence
  CDR1 heavy chain Chothia
SSLYYMC

SEQ ID NO: 481 - protein, 14 aa, Artificial Sequence
  CDR2 heavy chain Chothia
WIACVYGGSSGNTY

SEQ ID NO: 482 - protein, 11 aa, Artificial Sequence
  CDR3 heavy chain Chothia
ARFDVDGSGFN

SEQ ID NO: 483 - protein, 11 aa, Artificial Sequence
  CDR1 light chain Kabat, Chothia, AbM
QASQTIGSSLA

SEQ ID NO: 484 - protein, 7 aa, Artificial Sequence
  CDR2 light chain Kabat, Chothia, AbM
RASTLAS

SEQ ID NO: 485 - protein, 12 aa, Artificial Sequence
  CDR3 light chain Kabat, Chothia, IMGT, AbM
QWTDYGYIYIWA

SEQ ID NO: 486 - protein, 6 aa, Artificial Sequence
  CDR1 light chain IMGT
QTIGSS

SEQ ID NO: 487 - protein, 7 aa, Artificial Sequence
  CDR1 light chain Chothia
GSSLAWY

SEQ ID NO: 488 - protein, 10 aa, Artificial Sequence
  CDR2 light chain Chothia
LLIYRASTLA

SEQ ID NO: 489 - protein, 11 aa, Artificial Sequence
  CDR3 light chain Chothia
QWTDYGYIYIW

SEQ ID NO: 490 - protein, 6 aa, Artificial Sequence
  CDR1 heavy chain Kabat
NNYYMC

SEQ ID NO: 491 - protein, 18 aa, Artificial Sequence
  CDR2 heavy chain Kabat
CIYGGISGRTYYASWAKG

SEQ ID NO: 492 - protein, 8 aa, Artificial Sequence
  CDR3 heavy chain Kabat, Chothia, AbM
GYVGTSNL

SEQ ID NO: 493 - protein, 8 aa, Artificial Sequence
  CDR1 heavy chain Chothia
GFTISNNY

SEQ ID NO: 494 - protein, 7 aa, Artificial Sequence
  CDR2 heavy chain Chothia
YGGISGR

SEQ ID NO: 495 - protein, 9 aa, Artificial Sequence
  CDR1 heavy chain IMGT
GFTISNNYY

SEQ ID NO: 496 - protein, 9 aa, Artificial Sequence
  CDR2 heavy chain IMGT
IYGGISGRT

SEQ ID NO: 497 - protein, 10 aa, Artificial Sequence
  CDR3 heavy chain IMGT
VRGYVGTSNL

SEQ ID NO: 498 - protein, 11 aa, Artificial Sequence
  CDR1 heavy chain AbM
GFTISNNYYMC

SEQ ID NO: 499 - protein, 11 aa, Artificial Sequence
  CDR2 heavy chain AbM
CIYGGISGRTY

SEQ ID NO: 500 - protein, 7 aa, Artificial Sequence
  CDR1 heavy chain Chothia
SNNYYMC

SEQ ID NO: 501 - protein, 14 aa, Artificial Sequence
  CDR2 heavy chain Chothia
WIACIYGGISGRTY

SEQ ID NO: 502 - protein, 9 aa, Artificial Sequence
  CDR3 heavy chain Chothia
VRGYVGTSN

SEQ ID NO: 503 - protein, 11 aa, Artificial Sequence
  CDR1 light chain Kabat, Chothia, AbM
QASQSIYSSLA

SEQ ID NO: 504 - protein, 7 aa, Artificial Sequence
  CDR2 light chain Kabat, Chothia, AbM
DASHLAS

SEQ ID NO: 505 - protein, 15 aa, Artificial Sequence
  CDR3 light chain Kabat, Chothia, IMGT, AbM
QGGWYSSAATYVPNT

SEQ ID NO: 506 - protein, 6 aa, Artificial Sequence
  CDR1 light chain IMGT
QSIYSS

SEQ ID NO: 507 - protein, 7 aa, Artificial Sequence
  CDR1 light chain Chothia
YSSLAWY

SEQ ID NO: 508 - protein, 10 aa, Artificial Sequence
  CDR2 light chain Chothia
LLIYDASHLA

SEQ ID NO: 509 - protein, 14 aa, Artificial Sequence
  CDR3 light chain Chothia
QGGWYSSAATYVPN

SEQ ID NO: 510 - protein, 11 aa, Artificial Sequence
  CDR1 light chain Kabat, Chothia, AbM
KASENVGSYVS

SEQ ID NO: 511 - protein, 7 aa, Artificial Sequence
  CDR2 light chain Kabat, Chothia, AbM
GASNRYT

SEQ ID NO: 512 - protein, 9 aa, Artificial Sequence
  CDR3 light chain Kabat, Chothia, IMGT, AbM
GQSYSYPLT

SEQ ID NO: 513 - protein, 6 aa, Artificial Sequence
  CDR1 light chain IMGT
ENVGSY

SEQ ID NO: 514 - protein, 7 aa, Artificial Sequence
  CDR1 light chain Chothia
GSYVSWY

SEQ ID NO: 515 - protein, 10 aa, Artificial Sequence
  CDR2 light chain Chothia
LLIYGASNRY

SEQ ID NO: 516 - protein, 8 aa, Artificial Sequence
  CDR3 light chain Chothia
GQSYSYPL

SEQ ID NO: 517 - protein, 5 aa, Artificial Sequence
  CDR1 heavy chain Kabat
SYVMH

SEQ ID NO: 518 - protein, 17 aa, Artificial Sequence
  CDR2 heavy chain Kabat
YINPYNDGTKYNEKFKG

SEQ ID NO: 519 - protein, 10 aa, Artificial Sequence
  CDR3 heavy chain Kabat, Chothia, AbM
LGSRGTWFAY

SEQ ID NO: 520 - protein, 7 aa, Artificial Sequence
  CDR1 heavy chain Chothia
GYTFTSY

SEQ ID NO: 521 - protein, 6 aa, Artificial Sequence
  CDR2 heavy chain Chothia
NPYNDG

SEQ ID NO: 522 - protein, 8 aa, Artificial Sequence
  CDR1 heavy chain IMGT
GYTFTSYV

SEQ ID NO: 523 - protein, 8 aa, Artificial Sequence
  CDR2 heavy chain IMGT
INPYNDGT

SEQ ID NO: 524 - protein, 12 aa, Artificial Sequence
  CDR3 heavy chain IMGT
ARLGSRGTWFAY

SEQ ID NO: 525 - protein, 10 aa, Artificial Sequence
  CDR1 heavy chain AbM
GYTFTSYVMH

SEQ ID NO: 526 - protein, 10 aa, Artificial Sequence
  CDR2 heavy chain AbM
YINPYNDGTK

SEQ ID NO: 527 - protein, 6 aa, Artificial Sequence
  CDR1 heavy chain Chothia
TSYVMH

SEQ ID NO: 528 - protein, 13 aa, Artificial Sequence
  CDR2 heavy chain Chothia
WIGYINPYNDGTK

SEQ ID NO: 529 - protein, 11 aa, Artificial Sequence
  CDR3 heavy chain Chothia
ARLGSRGTWFA

SEQ ID NO: 530 - protein, 11 aa, Artificial Sequence
  CDR1 light chain Kabat, Chothia, AbM
KASQDVGTAVG

SEQ ID NO: 531 - protein, 7 aa, Artificial Sequence
  CDR2 light chain Kabat, Chothia, AbM
WASTRRT

SEQ ID NO: 532 - protein, 9 aa, Artificial Sequence
  CDR3 light chain Kabat, Chothia, IMGT, AbM
QQYSSYPLT

SEQ ID NO: 533 - protein, 6 aa, Artificial Sequence
  CDR1 light chain IMGT
QDVGTA

SEQ ID NO: 534 - protein, 7 aa, Artificial Sequence
  CDR1 light chain Chothia
GTAVGWY

SEQ ID NO: 535 - protein, 10 aa, Artificial Sequence
  CDR2 light chain Chothia
LLIYWASTRR

SEQ ID NO: 536 - protein, 8 aa, Artificial Sequence
  CDR3 light chain Chothia
QQYSSYPL

SEQ ID NO: 537 - protein, 5 aa, Artificial Sequence
  CDR1 heavy chain Kabat
SYGVH

SEQ ID NO: 538 - protein, 16 aa, Artificial Sequence
  CDR2 heavy chain Kabat
VIWSGGSTDYNAAFIS

SEQ ID NO: 539 - protein, 10 aa, Artificial Sequence
  CDR3 heavy chain Kabat, Chothia, AbM
NPLTATVMDY

SEQ ID NO: 540 - protein, 7 aa, Artificial Sequence
  CDR1 heavy chain Chothia
GFSLTSY

SEQ ID NO: 541 - protein, 5 aa, Artificial Sequence
  CDR2 heavy chain Chothia
WSGGS

SEQ ID NO: 542 - protein, 8 aa, Artificial Sequence
  CDR1 heavy chain IMGT
GFSLTSYG

SEQ ID NO: 543 - protein, 7 aa, Artificial Sequence
  CDR2 heavy chain IMGT
IWSGGST

SEQ ID NO: 544 - protein, 12 aa, Artificial Sequence
  CDR3 heavy chain IMGT
ARNPLTATVMDY

SEQ ID NO: 545 - protein, 10 aa, Artificial Sequence
  CDR1 heavy chain AbM
GFSLTSYGVH

SEQ ID NO: 546 - protein, 9 aa, Artificial Sequence
  CDR2 heavy chain AbM
VIWSGGSTD

SEQ ID NO: 547 - protein, 6 aa, Artificial Sequence
  CDR1 heavy chain Chothia
TSYGVH

SEQ ID NO: 548 - protein, 12 aa, Artificial Sequence
  CDR2 heavy chain Chothia
WLGVIWSGGSTD

SEQ ID NO: 549 - protein, 11 aa, Artificial Sequence
  CDR3 heavy chain Chothia
ARNPLTATVMD

SEQ ID NO: 550 - protein, 11 aa, Artificial Sequence
  CDR1 light chain Kabat, Chothia, AbM
KASQNVGTNVA

SEQ ID NO: 551 - protein, 7 aa, Artificial Sequence
  CDR2 light chain Kabat, Chothia, AbM
SASYRHS

SEQ ID NO: 552 - protein, 9 aa, Artificial Sequence
  CDR3 light chain Kabat, Chothia, IMGT, AbM
QQYNSYPLT

SEQ ID NO: 553 - protein, 6 aa, Artificial Sequence
  CDR1 light chain IMGT
QNVGTN

SEQ ID NO: 554 - protein, 7 aa, Artificial Sequence
  CDR1 light chain Chothia
GTNVAWY

SEQ ID NO: 555 - protein, 10 aa, Artificial Sequence
  CDR2 light chain Chothia
VLIYSASYRH

SEQ ID NO: 556 - protein, 8 aa, Artificial Sequence
  CDR3 light chain Chothia
QQYNSYPL

SEQ ID NO: 557 - protein, 5 aa, Artificial Sequence
  CDR1 heavy chain Kabat
SYWMS

SEQ ID NO: 558 - protein, 17 aa, Artificial Sequence
  CDR2 heavy chain Kabat
RIDPYDSETHYNQKFKD

SEQ ID NO: 559 - protein, 11 aa, Artificial Sequence
  CDR3 heavy chain Kabat, Chothia, AbM
TYYGNYDAMDY

SEQ ID NO: 560 - protein, 7 aa, Artificial Sequence
  CDR1 heavy chain Chothia
GYPFTSY

SEQ ID NO: 561 - protein, 6 aa, Artificial Sequence
  CDR2 heavy chain Chothia
DPYDSE

SEQ ID NO: 562 - protein, 8 aa, Artificial Sequence
  CDR1 heavy chain IMGT
GYPFTSYW

SEQ ID NO: 563 - protein, 8 aa, Artificial Sequence
  CDR2 heavy chain IMGT
IDPYDSET

SEQ ID NO: 564 - protein, 13 aa, Artificial Sequence
  CDR3 heavy chain IMGT
ARTYYGNYDAMDY

SEQ ID NO: 565 - protein, 10 aa, Artificial Sequence
  CDR1 heavy chain AbM
GYPFTSYWMS

SEQ ID NO: 566 - protein, 10 aa, Artificial Sequence
  CDR2 heavy chain AbM
RIDPYDSETH

SEQ ID NO: 567 - protein, 6 aa, Artificial Sequence
  CDR1 heavy chain Chothia
TSYWMS

SEQ ID NO: 568 - protein, 13 aa, Artificial Sequence
  CDR2 heavy chain Chothia
WIGRIDPYDSETH

SEQ ID NO: 569 - protein, 12 aa, Artificial Sequence
  CDR3 heavy chain Chothia
ARTYYGNYDAMD

SEQ ID NO: 570 - protein, 16 aa, Artificial Sequence
  CDR1 light chain Kabat, Chothia, AbM
RSSKSLLHSYGITYLY

SEQ ID NO: 571 - protein, 7 aa, Artificial Sequence
  CDR2 light chain Kabat, Chothia, AbM
QMSNLAS

SEQ ID NO: 572 - protein, 9 aa, Artificial Sequence
  CDR3 light chain Kabat, Chothia, IMGT, AbM
AQNLELPLT

SEQ ID NO: 573 - protein, 11 aa, Artificial Sequence
  CDR1 light chain IMGT
KSLLHSYGITY

SEQ ID NO: 574 - protein, 12 aa, Artificial Sequence
  CDR1 light chain Chothia
LHSYGITYLYWY

SEQ ID NO: 575 - protein, 10 aa, Artificial Sequence
  CDR2 light chain Chothia
LLIYQMSNLA

SEQ ID NO: 576 - protein, 8 aa, Artificial Sequence
  CDR3 light chain Chothia
AQNLELPL

SEQ ID NO: 577 - protein, 5 aa, Artificial Sequence
  CDR1 heavy chain Kabat
SYWIN

SEQ ID NO: 578 - protein, 17 aa, Artificial Sequence
  CDR2 heavy chain Kabat
NIYPSDNYTNYNQKFKD

SEQ ID NO: 579 - protein, 12 aa, Artificial Sequence
  CDR3 heavy chain Kabat, Chothia, AbM
GGGIYYENYFDY

SEQ ID NO: 580 - protein, 6 aa, Artificial Sequence
  CDR2 heavy chain Chothia
YPSDNY

SEQ ID NO: 581 - protein, 8 aa, Artificial Sequence
  CDR1 heavy chain IMGT
GYTFTSYW

SEQ ID NO: 582 - protein, 8 aa, Artificial Sequence
  CDR2 heavy chain IMGT
IYPSDNYT

SEQ ID NO: 583 - protein, 14 aa, Artificial Sequence
  CDR3 heavy chain IMGT
TRGGGIYYENYFDY

SEQ ID NO: 584 - protein, 10 aa, Artificial Sequence
  CDR1 heavy chain AbM
GYTFTSYWIN

SEQ ID NO: 585 - protein, 10 aa, Artificial Sequence
  CDR2 heavy chain AbM
NIYPSDNYTN

SEQ ID NO: 586 - protein, 6 aa, Artificial Sequence
  CDR1 heavy chain Chothia
TSYWIN

SEQ ID NO: 587 - protein, 13 aa, Artificial Sequence
  CDR2 heavy chain Chothia
WIGNIYPSDNYTN

SEQ ID NO: 588 - protein, 13 aa, Artificial Sequence
  CDR3 heavy chain Chothia
TRGGGIYYENYFD

SEQ ID NO: 589 - protein, 10 aa, Artificial Sequence
  CDR1 light chain Kabat, Chothia, AbM
SASSSVSYMH

SEQ ID NO: 590 - protein, 7 aa, Artificial Sequence
  CDR2 light chain Kabat, Chothia, AbM
DTSKLAS

SEQ ID NO: 591 - protein, 9 aa, Artificial Sequence
  CDR3 light chain Kabat, Chothia, IMGT, AbM
QQWSSNPPT

SEQ ID NO: 592 - protein, 5 aa, Artificial Sequence
  CDR1 light chain IMGT
SSVSY

SEQ ID NO: 593 - protein, 6 aa, Artificial Sequence
  CDR1 light chain Chothia
SYMHWY

SEQ ID NO: 594 - protein, 10 aa, Artificial Sequence
  CDR2 light chain Chothia
RWVYDTSKLA

SEQ ID NO: 595 - protein, 8 aa, Artificial Sequence
  CDR3 light chain Chothia
QQWSSNPP

SEQ ID NO: 596 - protein, 6 aa, Artificial Sequence
  CDR1 heavy chain Kabat
PIAYMS

SEQ ID NO: 597 - protein, 17 aa, Artificial Sequence
  CDR2 heavy chain Kabat
DILPSIGRTIYGEKFED

SEQ ID NO: 598 - protein, 14 aa, Artificial Sequence
  CDR3 heavy chain Kabat, Chothia, AbM
GDYYYGSREYAMDY

SEQ ID NO: 599 - protein, 8 aa, Artificial Sequence
  CDR1 heavy chain Chothia
DSEVFPIA

SEQ ID NO: 600 - protein, 6 aa, Artificial Sequence
  CDR2 heavy chain Chothia
LPSIGR

SEQ ID NO: 601 - protein, 9 aa, Artificial Sequence
  CDR1 heavy chain IMGT
DSEVFPIAY

SEQ ID NO: 602 - protein, 8 aa, Artificial Sequence
  CDR2 heavy chain IMGT
ILPSIGRT

SEQ ID NO: 603 - protein, 16 aa, Artificial Sequence
  CDR3 heavy chain IMGT
SRGDYYYGSREYAMDY

SEQ ID NO: 604 - protein, 11 aa, Artificial Sequence
  CDR1 heavy chain AbM
DSEVFPIAYMS

SEQ ID NO: 605 - protein, 10 aa, Artificial Sequence
  CDR2 heavy chain AbM
DILPSIGRTI

SEQ ID NO: 606 - protein, 7 aa, Artificial Sequence
  CDR1 heavy chain Chothia
FPIAYMS

SEQ ID NO: 607 - protein, 13 aa, Artificial Sequence
  CDR2 heavy chain Chothia
WIGDILPSIGRTI

SEQ ID NO: 608 - protein, 15 aa, Artificial Sequence
  CDR3 heavy chain Chothia
SRGDYYYGSREYAMD

SEQ ID NO: 609 - protein, 16 aa, Artificial Sequence
  CDR1 light chain Kabat, Chothia, AbM
RSSQSLVHSNGNTYLH

SEQ ID NO: 610 - protein, 7 aa, Artificial Sequence
  CDR2 light chain Kabat, Chothia, AbM
KVSNRFF

SEQ ID NO: 611 - protein, 9 aa, Artificial Sequence
  CDR3 light chain Kabat, Chothia, IMGT, AbM
SQTTYVPLT

SEQ ID NO: 612 - protein, 11 aa, Artificial Sequence
  CDR1 light chain IMGT
QSLVHSNGNTY

SEQ ID NO: 613 - protein, 12 aa, Artificial Sequence
  CDR1 light chain Chothia
VHSNGNTYLHWY

SEQ ID NO: 614 - protein, 10 aa, Artificial Sequence
  CDR2 light chain Chothia
LLIYKVSNRF

SEQ ID NO: 615 - protein, 8 aa, Artificial Sequence
  CDR3 light chain Chothia
SQTTYVPL

SEQ ID NO: 616 - protein, 5 aa, Artificial Sequence
  CDR1 heavy chain Kabat
EFGMH

SEQ ID NO: 617 - protein, 17 aa, Artificial Sequence
  CDR2 heavy chain Kabat
YISSGSSTIYYADTVKG

SEQ ID NO: 618 - protein, 5 aa, Artificial Sequence
  CDR3 heavy chain Kabat, Chothia, AbM
DWVDY

SEQ ID NO: 619 - protein, 7 aa, Artificial Sequence
  CDR1 heavy chain Chothia
GFTFSEF

SEQ ID NO: 620 - protein, 6 aa, Artificial Sequence
  CDR2 heavy chain Chothia
SSGSST

SEQ ID NO: 621 - protein, 8 aa, Artificial Sequence
  CDR1 heavy chain IMGT
GFTFSEFG

SEQ ID NO: 622 - protein, 8 aa, Artificial Sequence
  CDR2 heavy chain IMGT
ISSGSSTI

SEQ ID NO: 623 - protein, 7 aa, Artificial Sequence
  CDR3 heavy chain IMGT
ARDWVDY

SEQ ID NO: 624 - protein, 10 aa, Artificial Sequence
  CDR1 heavy chain AbM
GFTFSEFGMH

SEQ ID NO: 625 - protein, 10 aa, Artificial Sequence
  CDR2 heavy chain AbM
YISSGSSTIY

SEQ ID NO: 626 - protein, 6 aa, Artificial Sequence
  CDR1 heavy chain Chothia
SEFGMH

SEQ ID NO: 627 - protein, 13 aa, Artificial Sequence
  CDR2 heavy chain Chothia
WVAYISSGSSTIY

SEQ ID NO: 628 - protein, 6 aa, Artificial Sequence
  CDR3 heavy chain Chothia
ARDWVD

SEQ ID NO: 629 - protein, 16 aa, Artificial Sequence
  CDR2 heavy chain Kabat
VIWSGGSTDYNGAFIS

SEQ ID NO: 630 - protein, 8 aa, Artificial Sequence
  CDR3 heavy chain Kabat, Chothia, AbM
DRGGGFDY

SEQ ID NO: 631 - protein, 10 aa, Artificial Sequence
  CDR3 heavy chain IMGT
ARDRGGGFDY

SEQ ID NO: 632 - protein, 9 aa, Artificial Sequence
  CDR3 heavy chain Chothia
ARDRGGGFD

SEQ ID NO: 633 - protein, 17 aa, Artificial Sequence
  CDR1 light chain Kabat, Chothia, AbM
KSSQSLLWSVNQNNYLS

SEQ ID NO: 634 - protein, 7 aa, Artificial Sequence
  CDR2 light chain Kabat, Chothia, AbM
GASIRES

SEQ ID NO: 635 - protein, 11 aa, Artificial Sequence
  CDR3 light chain Kabat, Chothia, IMGT, AbM
QHNHGSFLPYT

SEQ ID NO: 636 - protein, 12 aa, Artificial Sequence
  CDR1 light chain IMGT
QSLLWSVNQNNY

SEQ ID NO: 637 - protein, 13 aa, Artificial Sequence
  CDR1 light chain Chothia
LWSVNQNNYLSWY

SEQ ID NO: 638 - protein, 10 aa, Artificial Sequence
  CDR2 light chain Chothia
LLIYGASIRE

SEQ ID NO: 639 - protein, 10 aa, Artificial Sequence
  CDR3 light chain Chothia
QHNHGSFLPY

SEQ ID NO: 640 - protein, 5 aa, Artificial Sequence
  CDR1 heavy chain Kabat
SYWMN

SEQ ID NO: 641 - protein, 17 aa, Artificial Sequence
  CDR2 heavy chain Kabat
RIYPGNGDTNYNGKFKD

SEQ ID NO: 642 - protein, 6 aa, Artificial Sequence
  CDR3 heavy chain Kabat, Chothia, AbM
YYELDY

SEQ ID NO: 643 - protein, 7 aa, Artificial Sequence
  CDR1 heavy chain Chothia
GYVFSSY

SEQ ID NO: 644 - protein, 6 aa, Artificial Sequence
  CDR2 heavy chain Chothia
YPGNGD

SEQ ID NO: 645 - protein, 8 aa, Artificial Sequence
  CDR1 heavy chain IMGT
GYVFSSYW

SEQ ID NO: 646 - protein, 8 aa, Artificial Sequence
  CDR2 heavy chain IMGT
IYPGNGDT

SEQ ID NO: 647 - protein, 8 aa, Artificial Sequence
  CDR3 heavy chain IMGT
ASYYELDY

SEQ ID NO: 648 - protein, 10 aa, Artificial Sequence
  CDR1 heavy chain AbM
GYVFSSYWMN

SEQ ID NO: 649 - protein, 10 aa, Artificial Sequence
  CDR2 heavy chain AbM
RIYPGNGDTN

SEQ ID NO: 650 - protein, 6 aa, Artificial Sequence
  CDR1 heavy chain Chothia
SSYWMN

SEQ ID NO: 651 - protein, 13 aa, Artificial Sequence
  CDR2 heavy chain Chothia
WIGRIYPGNGDTN

SEQ ID NO: 652 - protein, 7 aa, Artificial Sequence
  CDR3 heavy chain Chothia
ASYYELD

SEQ ID NO: 653 - protein, 5 aa, Artificial Sequence
  CDR1 heavy chain Kabat
SYAIN

SEQ ID NO: 654 - protein, 16 aa, Artificial Sequence
  CDR2 heavy chain Kabat
VLWPGGGTNYNSALKS

SEQ ID NO: 655 - protein, 9 aa, Artificial Sequence
  CDR3 heavy chain Kabat, Chothia, AbM
GSGTWYFDV

SEQ ID NO: 656 - protein, 5 aa, Artificial Sequence
  CDR2 heavy chain Chothia
WPGGG

SEQ ID NO: 657 - protein, 8 aa, Artificial Sequence
  CDR1 heavy chain IMGT
GFSLTSYA

SEQ ID NO: 658 - protein, 7 aa, Artificial Sequence
  CDR2 heavy chain IMGT
LWPGGGT

SEQ ID NO: 659 - protein, 11 aa, Artificial Sequence
  CDR3 heavy chain IMGT
ARGSGTWYFDV

SEQ ID NO: 660 - protein, 10 aa, Artificial Sequence
  CDR1 heavy chain AbM
GFSLTSYAIN

SEQ ID NO: 661 - protein, 9 aa, Artificial Sequence
  CDR2 heavy chain AbM
VLWPGGGTN

SEQ ID NO: 662 - protein, 6 aa, Artificial Sequence
  CDR1 heavy chain Chothia
TSYAIN

SEQ ID NO: 663 - protein, 12 aa, Artificial Sequence
  CDR2 heavy chain Chothia
WLGVLWPGGGTN

SEQ ID NO: 664 - protein, 10 aa, Artificial Sequence
  CDR3 heavy chain Chothia
ARGSGTWYFD

SEQ ID NO: 665 - protein, 11 aa, Artificial Sequence
  CDR1 light chain Kabat, Chothia, AbM
SASQGISNYLN

SEQ ID NO: 666 - protein, 7 aa, Artificial Sequence
  CDR2 light chain Kabat, Chothia, AbM
YTSSLHL

SEQ ID NO: 667 - protein, 9 aa, Artificial Sequence
  CDR3 light chain Kabat, Chothia, IMGT, AbM
QQYSKLPWT

SEQ ID NO: 668 - protein, 6 aa, Artificial Sequence
  CDR1 light chain IMGT
QGISNY

SEQ ID NO: 669 - protein, 7 aa, Artificial Sequence
  CDR1 light chain Chothia
SNYLNWY

SEQ ID NO: 670 - protein, 10 aa, Artificial Sequence
  CDR2 light chain Chothia
LLIYYTSSLH

SEQ ID NO: 671 - protein, 8 aa, Artificial Sequence
  CDR3 light chain Chothia
QQYSKLPW

SEQ ID NO: 672 - protein, 5 aa, Artificial Sequence
  CDR1 heavy chain Kabat
SYWMH

SEQ ID NO: 673 - protein, 17 aa, Artificial Sequence
  CDR2 heavy chain Kabat
EINLRNGGTNYYEKFKT

SEQ ID NO: 674 - protein, 7 aa, Artificial Sequence
  CDR3 heavy chain Kabat, Chothia, AbM
LTSAPSY

SEQ ID NO: 675 - protein, 6 aa, Artificial Sequence
  CDR2 heavy chain Chothia
NLRNGG

SEQ ID NO: 676 - protein, 8 aa, Artificial Sequence
  CDR2 heavy chain IMGT
INLRNGGT

SEQ ID NO: 677 - protein, 9 aa, Artificial Sequence
  CDR3 heavy chain IMGT
TILTSAPSY

SEQ ID NO: 678 - protein, 10 aa, Artificial Sequence
  CDR1 heavy chain AbM
GYTFTSYWMH

SEQ ID NO: 679 - protein, 10 aa, Artificial Sequence
  CDR2 heavy chain AbM
EINLRNGGTN

SEQ ID NO: 680 - protein, 6 aa, Artificial Sequence
  CDR1 heavy chain Chothia
TSYWMH

SEQ ID NO: 681 - protein, 13 aa, Artificial Sequence
  CDR2 heavy chain Chothia
WIGEINLRNGGTN

SEQ ID NO: 682 - protein, 8 aa, Artificial Sequence
  CDR3 heavy chain Chothia
TILTSAPS

SEQ ID NO: 683 - protein, 5 aa, Artificial Sequence
  CDR1 heavy chain Kabat
SFWIN

SEQ ID NO: 684 - protein, 17 aa, Artificial Sequence
  CDR2 heavy chain Kabat
NIYPDSSSTNYNEKFKN

SEQ ID NO: 685 - protein, 6 aa, Artificial Sequence
  CDR3 heavy chain Kabat, Chothia, AbM
SLTFDY

SEQ ID NO: 686 - protein, 7 aa, Artificial Sequence
  CDR1 heavy chain Chothia
GYTFTSF

SEQ ID NO: 687 - protein, 6 aa, Artificial Sequence
  CDR2 heavy chain Chothia
YPDSSS

SEQ ID NO: 688 - protein, 8 aa, Artificial Sequence
  CDR1 heavy chain IMGT
GYTFTSFW

SEQ ID NO: 689 - protein, 8 aa, Artificial Sequence
  CDR2 heavy chain IMGT
IYPDSSST

SEQ ID NO: 690 - protein, 8 aa, Artificial Sequence
  CDR3 heavy chain IMGT
ARSLTFDY

SEQ ID NO: 691 - protein, 10 aa, Artificial Sequence
  CDR1 heavy chain AbM
GYTFTSFWIN

SEQ ID NO: 692 - protein, 10 aa, Artificial Sequence
  CDR2 heavy chain AbM
NIYPDSSSTN

SEQ ID NO: 693 - protein, 6 aa, Artificial Sequence
  CDR1 heavy chain Chothia
TSFWIN

SEQ ID NO: 694 - protein, 13 aa, Artificial Sequence
  CDR2 heavy chain Chothia
WIGNIYPDSSSTN

SEQ ID NO: 695 - protein, 7 aa, Artificial Sequence
  CDR3 heavy chain Chothia
ARSLTFD

SEQ ID NO: 696 - protein, 11 aa, Artificial Sequence
  CDR1 light chain Kabat, Chothia, AbM
KASDNVGISVS

SEQ ID NO: 697 - protein, 9 aa, Artificial Sequence
  CDR3 light chain Kabat, Chothia, IMGT, AbM
GQSYSYPFT

SEQ ID NO: 698 - protein, 6 aa, Artificial Sequence
  CDR1 light chain IMGT
DNVGIS

SEQ ID NO: 699 - protein, 7 aa, Artificial Sequence
  CDR1 light chain Chothia
GISVSWY

SEQ ID NO: 700 - protein, 8 aa, Artificial Sequence
  CDR3 light chain Chothia
GQSYSYPF

SEQ ID NO: 701 - protein, 5 aa, Artificial Sequence
  CDR1 heavy chain Kabat
DDYLH

SEQ ID NO: 702 - protein, 17 aa, Artificial Sequence
  CDR2 heavy chain Kabat
WIDPENGDTEYASKFQG

SEQ ID NO: 703 - protein, 5 aa, Artificial Sequence
  CDR3 heavy chain Kabat, Chothia, AbM
QGFAC

SEQ ID NO: 704 - protein, 7 aa, Artificial Sequence
  CDR1 heavy chain Chothia
GFNIKDD

SEQ ID NO: 705 - protein, 6 aa, Artificial Sequence
  CDR2 heavy chain Chothia
DPENGD

SEQ ID NO: 706 - protein, 8 aa, Artificial Sequence
  CDR1 heavy chain IMGT
GFNIKDDY

SEQ ID NO: 707 - protein, 8 aa, Artificial Sequence
  CDR2 heavy chain IMGT
IDPENGDT

SEQ ID NO: 708 - protein, 7 aa, Artificial Sequence
  CDR3 heavy chain IMGT
STQGFAC

SEQ ID NO: 709 - protein, 10 aa, Artificial Sequence
  CDR1 heavy chain AbM
GFNIKDDYLH

SEQ ID NO: 710 - protein, 10 aa, Artificial Sequence
  CDR2 heavy chain AbM
WIDPENGDTE

SEQ ID NO: 711 - protein, 6 aa, Artificial Sequence
  CDR1 heavy chain Chothia
KDDYLH

SEQ ID NO: 712 - protein, 13 aa, Artificial Sequence
  CDR2 heavy chain Chothia
WIGWIDPENGDTE

SEQ ID NO: 713 - protein, 6 aa, Artificial Sequence
  CDR3 heavy chain Chothia
STQGFA

SEQ ID NO: 714 - protein, 16 aa, Artificial Sequence
  CDR1 light chain Kabat, Chothia, AbM
RSNKSLLHSDGITYLF

SEQ ID NO: 715 - protein, 7 aa, Artificial Sequence
  CDR2 light chain Kabat, Chothia, AbM
RMSNLAS

SEQ ID NO: 716 - protein, 9 aa, Artificial Sequence
  CDR3 light chain Kabat, Chothia, IMGT, AbM
AQMVEFPRT

SEQ ID NO: 717 - protein, 11 aa, Artificial Sequence
  CDR1 light chain IMGT
KSLLHSDGITY

SEQ ID NO: 718 - protein, 12 aa, Artificial Sequence
  CDR1 light chain Chothia
LHSDGITYLFWY

SEQ ID NO: 719 - protein, 10 aa, Artificial Sequence
  CDR2 light chain Chothia
LLIYRMSNLA

SEQ ID NO: 720 - protein, 8 aa, Artificial Sequence
  CDR3 light chain Chothia
AQMVEFPR

SEQ ID NO: 721 - protein, 5 aa, Artificial Sequence
  CDR1 heavy chain Kabat
DYYMA

SEQ ID NO: 722 - protein, 17 aa, Artificial Sequence
  CDR2 heavy chain Kabat
HINYDGSGTYYLDSLKG

SEQ ID NO: 723 - protein, 12 aa, Artificial Sequence
  CDR3 heavy chain Kabat, Chothia, AbM
DCYGSSSYAVDY

SEQ ID NO: 724 - protein, 7 aa, Artificial Sequence
  CDR1 heavy chain Chothia
GFTFSDY

SEQ ID NO: 725 - protein, 6 aa, Artificial Sequence
  CDR2 heavy chain Chothia
NYDGSG

SEQ ID NO: 726 - protein, 8 aa, Artificial Sequence
  CDR1 heavy chain IMGT
GFTFSDYY

SEQ ID NO: 727 - protein, 8 aa, Artificial Sequence
  CDR2 heavy chain IMGT
INYDGSGT

SEQ ID NO: 728 - protein, 14 aa, Artificial Sequence
  CDR3 heavy chain IMGT
ARDCYGSSSYAVDY

SEQ ID NO: 729 - protein, 10 aa, Artificial Sequence
  CDR1 heavy chain AbM
GFTFSDYYMA

SEQ ID NO: 730 - protein, 10 aa, Artificial Sequence
  CDR2 heavy chain AbM
HINYDGSGTY

SEQ ID NO: 731 - protein, 6 aa, Artificial Sequence
  CDR1 heavy chain Chothia
SDYYMA

SEQ ID NO: 732 - protein, 13 aa, Artificial Sequence
  CDR2 heavy chain Chothia
WVAHINYDGSGTY

SEQ ID NO: 733 - protein, 13 aa, Artificial Sequence
  CDR3 heavy chain Chothia
ARDCYGSSSYAVD

SEQ ID NO: 734 - protein, 16 aa, Artificial Sequence
  CDR1 light chain Kabat, Chothia, AbM
RSSQSIVHSNGNTYLE

SEQ ID NO: 735 - protein, 7 aa, Artificial Sequence
  CDR2 light chain Kabat, Chothia, AbM
KVSNRFS

SEQ ID NO: 736 - protein, 9 aa, Artificial Sequence
  CDR3 light chain Kabat, Chothia, IMGT, AbM
FQGSHVPWT

SEQ ID NO: 737 - protein, 11 aa, Artificial Sequence
  CDR1 light chain IMGT
QSIVHSNGNTY

SEQ ID NO: 738 - protein, 12 aa, Artificial Sequence
  CDR1 light chain Chothia
VHSNGNTYLEWY

SEQ ID NO: 739 - protein, 8 aa, Artificial Sequence
  CDR3 light chain Chothia
FQGSHVPW

SEQ ID NO: 740 - protein, 7 aa, Artificial Sequence
  CDR1 heavy chain Chothia
GFSLISY

SEQ ID NO: 741 - protein, 8 aa, Artificial Sequence
  CDR1 heavy chain IMGT
GFSLISYG

SEQ ID NO: 742 - protein, 10 aa, Artificial Sequence
  CDR1 heavy chain AbM
GFSLISYGVH

SEQ ID NO: 743 - protein, 6 aa, Artificial Sequence
  CDR1 heavy chain Chothia
ISYGVH

SEQ ID NO: 744 - protein, 7 aa, Artificial Sequence
  CDR2 light chain Kabat, Chothia, AbM
SASYRDS

SEQ ID NO: 745 - protein, 10 aa, Artificial Sequence
  CDR2 light chain Chothia
ALIYSASYRD

SEQ ID NO: 746 - protein, 7 aa, Artificial Sequence
  CDR2 light chain Kabat, Chothia, AbM
YTSSLHS

SEQ ID NO: 747 - protein, 9 aa, Artificial Sequence
  CDR3 light chain Kabat, Chothia, IMGT, AbM
QQYSDLPWT

SEQ ID NO: 748 - protein, 8 aa, Artificial Sequence
  CDR3 light chain Chothia
QQYSDLPW

SEQ ID NO: 749 - protein, 9 aa, Artificial Sequence
  CDR3 light chain Kabat, Chothia, IMGT, AbM
FQGSHVPYT

SEQ ID NO: 750 - protein, 8 aa, Artificial Sequence
  CDR3 light chain Chothia
FQGSHVPY

SEQ ID NO: 751 - protein, 5 aa, Artificial Sequence
  CDR1 heavy chain Kabat
TYAIS

SEQ ID NO: 752 - protein, 16 aa, Artificial Sequence
  CDR2 heavy chain Kabat
IIWPGGGTNYADSVKG

SEQ ID NO: 753 - protein, 9 aa, Artificial Sequence
  CDR3 heavy chain Kabat, Chothia, AbM
GAGTWYFDV

SEQ ID NO: 754 - protein, 7 aa, Artificial Sequence
  CDR1 heavy chain Chothia
GFSLTTY

SEQ ID NO: 755 - protein, 8 aa, Artificial Sequence
  CDR1 heavy chain IMGT
GFSLTTYA

SEQ ID NO: 756 - protein, 7 aa, Artificial Sequence
  CDR2 heavy chain IMGT
IWPGGGT

SEQ ID NO: 757 - protein, 11 aa, Artificial Sequence
  CDR3 heavy chain IMGT
ARGAGTWYFDV

SEQ ID NO: 758 - protein, 10 aa, Artificial Sequence
  CDR1 heavy chain AbM
GFSLTTYAIS

SEQ ID NO: 759 - protein, 9 aa, Artificial Sequence
  CDR2 heavy chain AbM
IIWPGGGTN

SEQ ID NO: 760 - protein, 6 aa, Artificial Sequence
  CDR1 heavy chain Chothia
TTYAIS

SEQ ID NO: 761 - protein, 12 aa, Artificial Sequence
  CDR2 heavy chain Chothia
WVSIIWPGGGTN

SEQ ID NO: 762 - protein, 10 aa, Artificial Sequence
  CDR3 heavy chain Chothia
ARGAGTWYFD

SEQ ID NO: 763 - protein, 17 aa, Artificial Sequence
  CDR2 heavy chain Kabat
YISSGGSTIYYADSVKG

SEQ ID NO: 764 - protein, 6 aa, Artificial Sequence
  CDR2 heavy chain Chothia
SSGGST

SEQ ID NO: 765 - protein, 8 aa, Artificial Sequence
  CDR2 heavy chain IMGT
ISSGGSTI

SEQ ID NO: 766 - protein, 10 aa, Artificial Sequence
  CDR2 heavy chain AbM
YISSGGSTIY

SEQ ID NO: 767 - protein, 13 aa, Artificial Sequence
  CDR2 heavy chain Chothia
WVSYISSGGSTIY

SEQ ID NO: 768 - protein, 16 aa, Artificial Sequence
  CDR2 heavy chain Kabat
VIWSGGSTDYNPSLKS

SEQ ID NO: 769 - protein, 12 aa, Artificial Sequence
  CDR2 heavy chain Chothia
WIGVIWSGGSTD

SEQ ID NO: 770 - protein, 9 aa, Artificial Sequence
  CDR3 light chain Kabat, Chothia, IMGT, AbM
QQYSKFPWT

SEQ ID NO: 771 - protein, 8 aa, Artificial Sequence
  CDR3 light chain Chothia
QQYSKFPW

SEQ ID NO: 772 - protein, 16 aa, Artificial Sequence
  CDR2 heavy chain Kabat
VIWRGGSTDYNAAFIS

SEQ ID NO: 773 - protein, 10 aa, Artificial Sequence
  CDR3 heavy chain Kabat, Chothia, AbM
ENYDYDEFAY

SEQ ID NO: 774 - protein, 5 aa, Artificial Sequence
  CDR2 heavy chain Chothia
WRGGS

SEQ ID NO: 775 - protein, 7 aa, Artificial Sequence
  CDR2 heavy chain IMGT
IWRGGST

SEQ ID NO: 776 - protein, 12 aa, Artificial Sequence
  CDR3 heavy chain IMGT
ARENYDYDEFAY

SEQ ID NO: 777 - protein, 9 aa, Artificial Sequence
  CDR2 heavy chain AbM
VIWRGGSTD

SEQ ID NO: 778 - protein, 12 aa, Artificial Sequence
  CDR2 heavy chain Chothia
WLGVIWRGGSTD

SEQ ID NO: 779 - protein, 11 aa, Artificial Sequence
  CDR3 heavy chain Chothia
ARENYDYDEFA

SEQ ID NO: 780 - protein, 11 aa, Artificial Sequence
  CDR1 light chain Kabat, Chothia, AbM
RASQNVGTNVA

SEQ ID NO: 781 - protein, 7 aa, Artificial Sequence
  CDR1 light chain Chothia
GTNVAWF

SEQ ID NO: 782 - protein, 10 aa, Artificial Sequence
  CDR2 light chain Chothia
SLIYSASYRD

SEQ ID NO: 783 - protein, 12 aa, Artificial Sequence
  CDR2 heavy chain Chothia
WLGIIWPGGGTN

SEQ ID NO: 784 - protein, 16 aa, Artificial Sequence
  CDR2 heavy chain Kabat
IIWPGGGTNYADSLKG

SEQ ID NO: 785 - protein, 13 aa, Artificial Sequence
  CDR2 heavy chain Chothia
WVAYISSGGSTIY

SEQ ID NO: 786 - protein, 16 aa, Artificial Sequence
  CDR2 heavy chain Kabat
IIWPGGGTNYNSALKS

SEQ ID NO: 787 - protein, 17 aa, Artificial Sequence
  CDR2 heavy chain Kabat
YISSGGSTIYYADTVKG
